(19) United States
(12) Patent Application Publication
(10) Pub. No.: US 2017/0283809 A1
(43) Pub. Date: Oct. 5, 2017

(54) RECOMBINANT MICROORGANISM PRODUCING ALKENES FROM ACETYL-COA

(71) Applicant: GLOBAL BIOENERGIES, Evry Cedex (FR)

(72) Inventor: Bernhard GÜNTNER, Vaals (NL)

(73) Assignee: Global Bioenergies, Evry Cedex (FR)

(21) Appl. No.: 15/508,046

(22) PCT Filed: Sep. 3, 2015
(86) PCT No.: PCT/EP2015/070194

§ 371 Date: Mar. 1, 2017

Related U.S. Application Data
(60) Provisional application No. 62/047,827, filed on Sep. 9, 2014.
(60) Provisional application No. 62/045,083, filed on Sep. 3, 2014.

(30) Foreign Application Priority Data
Sep. 26, 2014 (EP) 14186574.1
Sep. 26, 2014 (EP) 14186690.5

(51) Int. Cl. C12N 15/52; C12N 9/10; C12N 9/04; C12N 9/02; C12N 15/63; C12P 7/02

(52) U.S. Cl. CPC C12N 15/52; C12N 15/63; C12P 7/02; C12N 9/0006; C12N 9/001; C12N 9/1025; C12N 1/00

(57) ABSTRACT

Disclosed is a recombinant microorganism comprising endogenous enzymes that convert CO and/or CO₂ to acetyl-CoA. The recombinant microorganism contains a heterologous nucleic acid sequence encoding one or more enzymes that allow the conversion of acetyl-CoA to an alkene with a main chain of 1 to 5 carbon atoms. The heterologous nucleic acid sequence comprises one or more coding sequences encoding one or more enzymes that catalyse the conversion of acetyl-CoA to crotonyl-CoA, and that further catalyse the conversion of crotonyl-CoA to an alkene; or one or more coding sequences encoding one or more enzymes that catalyse the conversion of acetyl-CoA to 3-methylcrotonyl-CoA, and that further catalyse the conversion of 3-methylcrotonyl-CoA to an alkene; or one or more coding sequences encoding one or more enzymes that catalyse the conversion of acetyl-CoA to propionyl-CoA, and that further catalyse the conversion of propionyl-CoA to an alkene. Each coding sequence is operationally linked to a transcriptional promoter.

### CROSS-REFERENCE TO RELATED APPLICATIONS

[0001] The present application claims the benefit of and the priority to an application for “Genetically engineered microorganism and process for converting gaseous C1-carbon sources and/or gaseous C1-carbon sources and electrons into alkenes” filed on 3 Sep. 2014 with the USPTO, and there duly assigned serial number U.S. 62/045,083. The present application also claims the benefit of and the priority to an application for “Genetically engineered microorganism and process for converting gaseous C1-carbon sources and/or gaseous C1-carbon sources and electrons into 1,3-butadiene” filed on 9 Sep. 2014 with the USPTO, and there duly assigned serial number U.S. 62/047,827. The present application also claims the benefit of and the priority to an application for “Genetically engineered microorganism and process for converting gaseous C1-carbon sources and/or gaseous C1-carbon sources and electrons into 2-methyl-1,3-butadiene and 1,3-butadiene” filed on 26 Sep. 2014 with the European Patent Office, and there duly assigned serial number EP 14 186 574. The present application also claims the benefit of and the priority to an application for “Genetically engineered microorganism and process for converting gaseous C1-carbon sources and/or gaseous C1-carbon sources and electrons into alkenes” filed on 26 Sep. 2014 with the European Patent Office, and there duly assigned serial number EP 14 186 690. The contents of said applications U.S. 62/045,083, U.S. 62/047,827, EP 14 186 574, and EP 14 186 690 are incorporated herein by reference for all purposes in their entirety including all tables, figures, and claims—as well as including an incorporation of any element or part of the description, claims or drawings not contained herein and referred to in Rule 20.5(a) of the PCT, pursuant to Rule 4.18 of the PCT.

### REFERENCE TO A SEQUENCE LISTING

[0002] This application includes a sequence listing.

### FIELD OF THE DISCLOSURE

[0003] A recombinant microorganism is provided. Also provided is a method in which the recombinant microorganism is being used. The method is a method of converting a C₁-carbon source into one or more alkanes and/or alkenes with a main chain of 1 to 6 carbon atoms.

### BACKGROUND

[0004] The following discussion of the background is merely provided to aid the reader in understanding the microorganisms, method and uses disclosed in the following, and is not admitted to describe or constitute prior art.

[0005] Increased demand for energy and bulk chemicals by the global economy has put increasing pressure on the cost of hydrocarbons. Many industries, including the chemical and plastics industry rely heavily on fossil hydrocarbon sources being available as feedstock for their products. Alkanes are the major constituents of gasoline, diesel, and jet fuel. Alkenes are commonly produced by cracking the alkanes found in crude oil. The rapid depletion of fossil fuels has been a driving force to identify alternative sources for the production of alkanes. Many long chain alkanes are naturally produced by diverse species. However, for alkanes and alkenes with a chain length of less than about 10 atoms a natural biosynthesis pathway is only known for methane. Such short chain alkanes and alkenes are used not only as fuel, but are also important in the production of bulk chemicals. They for instance serve as building blocks for plastics, poylesters, solvents, fuels, adhesives, or paints. Propene (propylene) for instance is a terminal olefin which is used to manufacture polyethylene, polypropylene, alpha olefins, styrene, polyesters, acrylics, ethylene glycol antifreeze, polyvinyl chloride (PVC), propylene oxide, keto alcohols, and isopropanol. Propene is traditionally derived from fractional distillation from hydrocarbon mixtures obtained from cracking and other refining processes. Ethylene also serves as a starting material, e.g. as a monomer for the production of polyurethanes, rubber products, laboratory chemicals, industrial fluids, and anti-freeze compounds. It is also used to produce fuel and fuel additives.

[0006] 1,3-butadiene is a colorless gas that condenses to a liquid at minus 4.5 degrees centigrade. Using an extractive distillation process, butadiene is derived from the crude C4 stream, one of the cracker by-products of ethylene and propylene production. The largest single use of butadiene is in the production of styrene-butadiene rubber (SBR) which, in turn, is principally used in the manufacture of automobile tires. SBR is also used in adhesives, sealants, coatings and in rubber articles like shoe soles. Polybutadiene is also used in tires and can be used as an intermediate in the production of acrylonitrile-butadiene-styrene (ABS). ABS is widely used in items such as telephones, computer casings and other appliances. Other polymers made from butadiene include styrene-butadiene latex, used for example in carpet backings and adhesives; nitrile rubber, used in hoses, fuel lines, gasket seals, gloves and footwear; and styrene-butadiene block copolymers which are used in many end-uses ranging from asphalt modifiers (road and roofing construction applications), to adhesives, footwear and toys. Chemical intermediates made from butadiene include adiponitrile and chloroprene which are used, respectively, in the manufacture of nylon and neoprene. Approximately 10 million tons of butadiene are currently produced annually. The sales of 1,3-butadiene exceed a value of over 10 billion US dollars worldwide. The ability to manufacture butadiene from alternative and/or renewable feedstocks represents a major advance in the quest for more sustainable chemical production processes.

[0007] 2-methyl-1,3-butadiene or isoprene, is a colorless volatile liquid, which is naturally produced by many plants, animals and bacteria. 2-methyl-1,3-butadiene serves as a key starting material for the synthesis of a variety of synthetic polymers, in particular of synthetic elastomers. Most of the 2-methyl-1,3-butadiene today available and needed for the production of synthetic elastomers is produced by thermal cracking of petroleum or oil. Elastomeres, or rubbers, are needed not only in tire production, but also in the rubber industry, where they are used for a wide variety of consumer products such as medical gloves, fittings, rubber bands, shoes, sporting goods, etc. Synthetic rubber is based primarily on butadiene polymers, which are obtained as a by-product from ethylene and propylene production. Although 2-methyl-1,3-butadiene can be obtained by fractionating petroleum, the purification of petroleum is expensive and time-consuming, with the yield of the obtained 2-methyl-1,3-butadiene being low when compared to the efforts required. The supply of 2-methyl-1,3-butadiene is furthermore at risk, as availability of natural rubber tightens and its price increases. Also, due to a more profound ecological awareness, acceptance of crude C5 feed streams from olefine cracking is declining. Thus, recently, more economical methods for producing 2-methyl-1,3-butadiene have been endeavored, and in particular biobased processes. Although the biological resources for 2-methyl-1,3-butadiene, i.e. certain plants, are available as such, a commercial process to produce and recover 2-methyl-1,3-butadiene from plants that would be economically and practically feasible has not been developed so far. Attempts of isoprene production from synthesis using bacteria gas have been made (U.S. patent applications US 2014/0234926, US2013/0323820, international patent applications WO 2014/065271, WO 2013/180584, WO2013/181647), the strains used do not meet the requirements of industrial production in terms of yield, purity and stability.

[0008] Available technologies for syngas conversion to liquid fuels or chemicals include chemical catalytic processes such as the Fischer-Tropsch process as well as processes for the synthesis of methanol or other mixed alcohols, and biological gas fermentation processes. The Fischer-Tropsch process is in use since almost one hundred years and relies on metal-based, inorganic catalysts for the conversion of syngas into longer chain hydrocarbons.

[0009] Biologic systems that fix carbon through natural biochemical metabolic processes are known. Algal systems have been developed to create hydrocarbons through photosynthetic reactions, as well as heterotrophic reactions fed by sugar that indirectly depend upon photosynthesis. Bacterial cells have been genetically engineered to process sugar feedstocks into useful hydrocarbons in heterotrophic fermentation systems.

[0010] Biological pathways to produce for instance alkenes directly or indirectly have been disclosed (US 2011/0269204, US 2011/0091952, US 2011/0269204, WO 2012/058606, US 2012/0329119, US 2013/0224808, US 2013/0316425, WO 2013/148348, US 2014/0039143, WO 2014/047209). However, the methods of these disclosures have limitations that render them inter alia inefficient or unsuitable for large scale industrial processes. Several publications (Lee, C. C., et al., Science (2010) 329, 5992, 642; Yang, Z.-Y, et al., Journal of Biological Chemistry (2011) 286, 22, 19417-19421) show that purified vanadium as well as molybdenum nitrogenases are able to catalyze the conversion of CO or CO₂ or CN to form hydrocarbons in vitro.

### SUMMARY

[0011] A recombinant microorganism is provided. The recombinant microorganism is typically capable of producing one or more alkenes with a main chain of 2 to 5 carbon atoms from a C₁-carbon compound, in particular carbon monoxide and/or carbon dioxide. The recombinant microorganism may also be capable of producing one or more alkanes and/or alkenes with a main chain of 1 to 6 carbon atoms from a C₁-carbon such as carbon monoxide, carbon dioxide and/or cyanide. In some embodiments the recombinant microorganism may be capable of producing one or more alkanes and/or alkenes with a main chain of 2 or 3 carbon atoms from carbon monoxide or carbon dioxide. In some embodiments the recombinant microorganism may be capable of producing one or more alkanes and/or alkenes with a main chain of 4 or 5 carbon atoms from carbon monoxide or carbon dioxide. In some embodiments the recombinant microorganism is not capable of carrying out photosynthesis. In some embodiments the recombinant microorganism has endogenous enzymes that allow the recombinant microorganism to perform a biosynthesis of acetyl-CoA from CO, CO₂ and/or cyanide. In some embodiments the recombinant microorganism has homologous enzymes that allow the recombinant microorganism to perform a biosynthesis of acetyl-CoA from CO, CO₂ and/or cyanide.

[0012] The cells described herein contain artificial and efficient pathways for the biosynthesis of alkanes and/or alkenes. In certain embodiments the respective biosynthesis genes are stably integrated into the host chromosome. Provided are also processes by means of which 2 alkanes and/or alkenes can be produced with high yield and purity that are sufficient to meet the demands of a robust commercial process. These processes represent a very clean and efficient (in terms of cost- and time-saving) and industrially feasible way of producing alkanes and/or alkenes of interest.

[0013] According to a first aspect, a recombinant microorganism is provided. The recombinant microorganism contains a heterologous nucleic acid sequence, which encodes one or more enzymes that catalyse the conversion of acetyl-CoA to one or more alkanes and/or alkenes with a main chain of 1 to 5 carbon atoms. The heterologous nucleic acid sequence includes a coding sequence or a combination of coding sequences that encode one or more enzymes that catalyse the conversion of acetyl-CoA to one or more alkanes and/or alkenes with a main chain of 1 to 5 carbon atoms. Each coding sequence is operationally linked to a transcriptional promoter.

[0014] In some embodiments the recombinant microorganism contains a heterologous nucleic acid sequence that encodes one or more enzymes that allow the conversion of acetyl-CoA to one or more alkenes with a main chain of 2 to 5 carbon atoms. In some embodiments the recombinant microorganism furthermore contains one or more endogenous enzymes that convert a C₁-carbon source to acetyl-CoA. The C₁-carbon source is in some embodiments at least one of carbon monoxide, carbon dioxide and cyanide.

[0015] In some embodiments the recombinant microorganism does not include at least one coding sequence or a combination of coding sequences that encode one or more enzymes that catalyse the conversion of acetyl-CoA to one or more alkanes and/or alkenes with a main chain of 1 to 8 carbon atoms. In embodiments where the recombinant microorganism includes more than one coding sequences or a combination of more than one coding sequences that encode one or more enzymes that catalyse the conversion of acetyl-CoA to one or more alkanes and/or alkenes with a main chain of 1 to 8 carbon atoms, the recombinant microorganism may not include at least one of the respective coding sequences.

[0016] According to some embodiments of the recombinant microorganism according to the first aspect the heterologous nucleic acid sequence includes a coding sequence that encodes a nitrogenase enzyme EC 1.18.6.1 or EC 1.19.6.1.

[0017] According to some embodiments of the recombinant microorganism according to the first aspect the heterologous nucleic acid sequence includes one or more coding sequences encoding one or more enzymes that catalyse the conversion of acetyl-CoA to crotonyl-CoA, and that further catalyse the conversion of crotonyl-CoA to an alkene.

[0018] According to some embodiments of the recombinant microorganism according to the first aspect the heterologous nucleic acid sequence includes one or more coding sequences encoding one or more enzymes that catalyse the conversion of acetyl-CoA to 3-methylcrotonyl-CoA, and that further catalyse the conversion of 3-methylcrotonyl-CoA to an alkene.

[0019] According to some embodiments of the recombinant microorganism according to the first aspect the heterologous nucleic acid sequence includes one or more coding sequences encoding one or more enzymes that catalyse the conversion of acetyl-CoA to propionyl-CoA, and that further catalyse the conversion of propionyl-CoA to an alkene.

[0020] According to some embodiments of the recombinant microorganism according to the first aspect the heterologous nucleic acid sequence includes one or more coding sequences encoding one or more enzymes that catalyse the conversion of acetyl-CoA to acryloyl-CoA, and that further catalyse the conversion of acryloyl-CoA to an alkene.

[0021] According to some embodiments of the recombinant microorganism according to the first aspect the one or more enzymes that catalyse the conversion of acetyl-CoA to crotonyl-CoA include acetyl-CoA carboxylase (EC 6.4.1.2); acetoacetyl-CoA synthase (EC 2.3.1.194); acetoacetyl-CoA reductase (EC 1.1.1.36); and enoyl-CoA hydratase 2 (EC 4.2.1.119). According to some embodiments of the recombinant microorganism according to the first aspect the one or more enzymes that catalyse the conversion of acetyl-CoA to crotonyl-CoA include acetyl-CoA C-acetyltransferase (EC 2.3.1.9); 3-hydroxybutyryl-CoA dehydrogenase (EC 1.1.1.157); and 3-hydroxybutyryl-CoA dehydratase. According to some embodiments of the recombinant microorganism according to the first aspect the one or more enzymes that catalyse the conversion of acetyl-CoA to crotonyl-CoA include 4-aminobutyrate aminotransferase (EC 2.6.1.19); glutamate dehydrogenase (EC 1.4.1.2); 2-hydroxyglutarate dehydrogenase (EC 1.1.99.2); glutaconate CoA-transferase (EC 2.8.3.12); 2-hydroxyglutaryl-CoA dehydratase (EC 4.2.1.-); and glutaconyl-CoA decarboxylase (EC 4.1.1.70). According to some embodiments of the recombinant microorganism according to the first aspect the one or more enzymes that catalyse the conversion of acetyl-CoA to crotonyl-CoA include 4-aminobutyrate aminotransferase (EC 2.6.1.19); 4-hydroxybutyrate dehydrogenase (EC 1.1.1.61); 4-hydroxybutyrate CoA-transferase (EC 2.8.3.-); vinylacetyl-CoA-Delta-isomerase (EC 4.2.1.120); and 4-hydroxybutyryl-CoA dehydratase (EC 5.3.3.3).

[0022] According to some embodiments of the recombinant microorganism according to the first aspect the one or more enzymes that catalyse the conversion of acetyl-CoA to 3-methylcrotonyl-CoA include acetyl-CoA C-acetyltransferase (EC 2.3.1.9); 3-hydroxy-3-methylglutaryl-CoA synthase (EC 2.3.3.10); and 3-methylglutaconyl-CoA hydratase (EC 4.2.1.18). The one or more enzymes that catalyse the conversion of acetyl-CoA to 3-methylcrotonyl-CoA may also include 3-methylcrotonyl-CoA carboxylase (EC 6.4.1.4). The one or more enzymes that catalyse the conversion of acetyl-CoA to 3-methylcrotonyl-CoA may in some embodiments include acetyl-CoA carboxylase (EC 6.4.1.2); acetoacetyl-CoA synthase (EC 2.3.1.194); 3-hydroxy-3-methylglutaryl-CoA synthase (EC 2.3.3.10); 3-methylglutaconyl-CoA hydratase (EC 4.2.1.18); and 3-methylcrotonyl-CoA carboxylase (EC 6.4.1.4). In some embodiments the one or more enzymes that catalyse the conversion of acetyl-CoA to 3-methylcrotonyl-CoA include acetyl-CoA C-acetyltransferase (EC 2.3.1.9); acetyl-CoA carboxylase (EC 6.4.1.2); acetoacetyl-CoA synthase (EC 2.3.1.194); 3-hydroxy-3-methylglutaryl-CoA synthase (EC 2.3.3.10); 3-methylglutaconyl-CoA hydratase (EC 4.2.1.18); and 3-methylcrotonyl-CoA carboxylase (EC 6.4.1.4).

[0023] According to some embodiments of the recombinant microorganism according to the first aspect the one or more enzymes that catalyse the conversion of acetyl-CoA to propionyl-CoA include acetyl-CoA carboxylase (EC 6.4.1.2); malonyl CoA reductase (EC 1.2.1.75); malonyl CoA reductase (EC 1.1.1.298); propionyl-CoA synthase (EC 6.2.1.36); propionyl-CoA synthase/acryloyl-CoA synthase (EC 4.2.1.116); and propionyl-CoA synthase (EC 1.3.1.84). According to some embodiments of the recombinant microorganism according to the first aspect the one or more enzymes that catalyse the conversion of acetyl-CoA to propionyl-CoA include acetyl-CoA carboxylase (EC 6.4.1.2) and methylmalonyl-CoA decarboxylase (EC 4.1.1.41). The one or more enzymes that catalyse the conversion of acetyl-CoA to propionyl-CoA may for example include acetyl-CoA carboxylase (EC 6.4.1.2); methylmalonyl-CoA mutase (EC 5.4.99.2) and methylmalonyl-CoA decarboxylase (EC 4.1.1.41). According to some embodiments of the recombinant microorganism according to the first aspect the one or more enzymes that catalyse the conversion of acetyl-CoA to propionyl-CoA include 2-oxoglutarate/butyrate ferredoxin oxidoreductase (EC 1.2.7.3) and/or pyruvate/2-oxobutyrate ferredoxin oxidoreductase (EC 1.2.7.1). According to some embodiments of the recombinant microorganism according to the first aspect the one or more enzymes that catalyse the conversion of acetyl-CoA to propionyl-CoA include lactate CoA-transferase (EC 2.8.3.-); lactoyl-CoA dehydratase (EC 4.2.1.54); and propionyl-CoA synthase (EC 1.3.1.84).

[0024] According to some embodiments of the recombinant microorganism according to the first aspect the one or more enzymes that catalyse the conversion of acetyl-CoA to acryloyl-CoA include acetyl-CoA carboxylase (EC 6.4.1.2); malonyl CoA reductase (EC 1.2.1.75); malonyl CoA reductase (EC 1.1.1.298); propionyl-CoA synthase (EC 6.2.1.36); and propionyl-CoA synthase/acryloyl-CoA synthase (EC 4.2.1.116). In some embodiments the one or more enzymes that catalyse the conversion of acetyl-CoA to acryloyl-CoA include lactate CoA-transferase (EC 2.8.3.-); and lactoyl-CoA dehydratase (EC 4.2.1.54).

[0025] In some embodiments the one or more enzymes that catalyse the conversion of crotonyl-CoA to an alkene include acyl-CoA thioesterase (EC 3.1.2.-) and phenyl acrylic acid decarboxylase (EC 4.1.1.-). In some embodiments the one or more enzymes that catalyse the conversion of crotonyl-CoA to an alkene include phosphate butyryltransferase (EC 2.3.1.19); butyrate kinase (EC 2.7.2.7), and phenyl acrylic acid decarboxylase (EC 4.1.1.-). In some embodiments the one or more enzymes that catalyse the conversion of crotonyl-CoA to an alkene include trans-2-enoyl-CoA reductase (EC1.1.1.36); acetyl-CoA C-acetyltransferase (EC 2.3.1.9); 3-hydroxybutyryl-CoA dehydrogenase (EC 1.1.1.157); 3-hydroxybutyryl-CoA dehydratase (EC 4.2.1.55); acyl-CoA thioesterase (EC 3.1.2.-); and a phenyl acrylic acid decarboxylase enzyme (EC 4.1.1.-). In some embodiments the one or more enzymes that catalyse the conversion of crotonyl-CoA to an alkene include trans-2-enoyl-CoA reductase (EC1.1.1.36); acetyl-CoA C-acetyltransferase (EC 2.3.1.9); 3-hydroxybutyryl-CoA dehydrogenase (EC 1.1.1.157); 3-hydroxybutyryl-CoA dehydratase (EC 4.2.1.55); phosphate butyryltransferase (EC 2.3.1.19); butyrate kinase (EC 2.7.2.7); and a phenyl acrylic acid decarboxylase enzyme (EC 4.1.1.-).

[0026] In some embodiments the one or more enzymes that catalyse the conversion of crotonyl-CoA to an alkene include aldehyde dehydrogenase (EC 1.2.1.-); aldehyde dehydrogenase (EC 1.2.1.-) and/or alcohol dehydrogenase (EC 1.1.1.-); and geraniol isomerase (EC 5.4.4.4), which is also linalool dehydratase (EC 4.2.1.127).

[0027] In some embodiments the one or more enzymes that catalyse the conversion of crotonyl-CoA to an alkene include aldehyde dehydrogenase (EC 1.2.1.-); aldehyde dehydrogenase (EC 1.2.1.-) and/or alcohol dehydrogenase (EC 1.1.1.-); farnesol kinase (EC 2.7.1.-), geranylgeraniol kinase (EC 2.7.1.B19), hydroxyethylthiazole kinase (EC 2.7.1.50) and/or undecaprenol kinase (EC 2.7.1.66); and 2-methyl-1,3-butadiene synthase (EC 4.2.3.27) and/or methylbutenol synthase.

[0028] In some embodiments the one or more enzymes that catalyse the conversion of crotonyl-CoA to an alkene include alcohol dehydrogenase (EC 1.1.1.-); aldehyde dehydrogenase (EC 1.2.1.-) and/or alcohol dehydrogenase (EC 1.1.1.-); and geraniol isomerase (EC 5.4.4.4), which is also linalool dehydratase (EC 4.2.1.127).

[0029] In some embodiments the one or more enzymes that catalyse the conversion of crotonyl-CoA to an alkene include alcohol dehydrogenase (EC 1.1.1.-); aldehyde dehydrogenase (EC 1.2.1.-) and/or alcohol dehydrogenase (EC 1.1.1.-); farnesol kinase (EC 2.7.1.-), geranylgeraniol kinase (EC 2.7.1.B19), hydroxyethylthiazole kinase (EC 2.7.1.50) and/or undecaprenol kinase (EC 2.7.1.66); and 2-methyl-1,3-butadiene synthase (EC 4.2.3.27) and/or methylbutenol synthase.

[0030] In some embodiments the one or more enzymes that catalyse the conversion of crotonyl-CoA to an alkene include acyl-CoA thioesterase (EC 3.1.2.-); aldehyde dehydrogenase (EC 1.2.1.-) and/or or alcohol dehydrogenase (EC 1.1.1.-); aldehyde dehydrogenase (EC 1.2.1.-) and/or alcohol dehydrogenase (EC 1.1.1.-); and geraniol isomerase (EC 5.4.4.4), which is also linalool dehydratase (EC 4.2.1.127).

[0031] In some embodiments the one or more enzymes that catalyse the conversion of crotonyl-CoA to an alkene include acyl-CoA thioesterase (EC 3.1.2.-); aldehyde dehydrogenase (EC 1.2.1.-) and/or or alcohol dehydrogenase (EC 1.1.1.-); aldehyde dehydrogenase (EC 1.2.1.-) and/or alcohol dehydrogenase (EC 1.1.1.-); farnesol kinase (EC 2.7.1.-), geranylgeraniol kinase (EC 2.7.1.B19), hydroxyethylthiazole kinase (EC 2.7.1.50) and/or undecaprenol kinase (EC 2.7.1.66); and 2-methyl-1,3-butadiene synthase (EC 4.2.3.27) and/or methylbutenol synthase.

[0032] In some embodiments the one or more enzymes that catalyse the conversion of crotonyl-CoA to an alkene include aldehyde ferredoxin oxidoreductase (EC 1.2.7.5); acyl-CoA thioesterase (EC 3.1.2.-); aldehyde dehydrogenase (EC 1.2.1.-) and/or alcohol dehydrogenase (EC 1.1.1.-); and geraniol isomerase (EC 5.4.4.4), which is also linalool dehydratase (EC 4.2.1.127).

[0033] In some embodiments the one or more enzymes that catalyse the conversion of crotonyl-CoA to an alkene include aldehyde ferredoxin oxidoreductase (EC 1.2.7.5); acyl-CoA thioesterase (EC 3.1.2.-); aldehyde dehydrogenase (EC 1.2.1.-) and/or alcohol dehydrogenase (EC 1.1.1.-); farnesol kinase (EC 2.7.1.-), geranylgeraniol kinase (EC 2.7.1.B19), hydroxyethylthiazole kinase (EC 2.7.1.50) and/or undecaprenol kinase (EC 2.7.1.66); and 2-methyl-1,3-butadiene synthase (EC 4.2.3.27) and/or methylbutenol synthase.

[0034] In some embodiments the one or more enzymes that catalyse the conversion of crotonyl-CoA to an alkene include phosphate butyryltransferase (EC 2.3.1.19); butyrate kinase (EC 2.7.2.7); aldehyde dehydrogenase (EC 1.2.1.-) or alcohol dehydrogenase (EC 1.1.1.-); aldehyde dehydrogenase (EC 1.2.1.-) and/or alcohol dehydrogenase (EC 1.1.1.-); and geraniol isomerase (EC 5.4.4.4), which is also linalool dehydratase (EC 4.2.1.127).

[0035] In some embodiments the one or more enzymes that catalyse the conversion of crotonyl-CoA to an alkene include phosphate butyryltransferase (EC 2.3.1.19); butyrate kinase (EC 2.7.2.7); aldehyde dehydrogenase (EC 1.2.1.-) or alcohol dehydrogenase (EC 1.1.1.-); aldehyde dehydrogenase (EC 1.2.1.-) and/or alcohol dehydrogenase (EC 1.1.1.-); farnesol kinase (EC 2.7.1.-), geranylgeraniol kinase (EC 2.7.1.B19), hydroxyethylthiazole kinase (EC 2.7.1.50) and/or undecaprenol kinase (EC 2.7.1.66); and 2-methyl-1,3-butadiene synthase (EC 4.2.3.27) and/or methylbutenol synthase.

[0036] In some embodiments the one or more enzymes that catalyse the conversion of crotonyl-CoA to an alkene include phosphate butyryltransferase (EC 2.3.1.19); butyrate kinase (EC 2.7.2.7); aldehyde ferredoxin oxidoreductase (EC 1.2.7.5); aldehyde dehydrogenase (EC 1.2.1.-) and/or alcohol dehydrogenase (EC 1.1.1.-); and geraniol isomerase (EC 5.4.4.4), which is also linalool dehydratase (EC 4.2.1.127).

[0037] In some embodiments the one or more enzymes that catalyse the conversion of crotonyl-CoA to an alkene include phosphate butyryltransferase (EC 2.3.1.19); butyrate kinase (EC 2.7.2.7); aldehyde ferredoxin oxidoreductase (EC 1.2.7.5); aldehyde dehydrogenase (EC 1.2.1.-) and/or alcohol dehydrogenase (EC 1.1.1.-); farnesol kinase (EC 2.7.1.-), geranylgeraniol kinase (EC 2.7.1.B19), hydroxyethylthiazole kinase (EC 2.7.1.50) and/or undecaprenol kinase (EC 2.7.1.66); and 2-methyl-1,3-butadiene synthase (EC 4.2.3.27) and/or methylbutenol synthase.

[0038] In some embodiments the one or more enzymes that catalyse the conversion of crotonyl-CoA to an alkene include phenyl acrylic acid decarboxylase enzyme (EC 4.1.1.-); and acyl-CoA thioesterase (EC 3.1.2.-). In some embodiments the one or more enzymes that catalyse the conversion of crotonyl-CoA to an alkene include phenyl acrylic acid decarboxylase enzyme (EC 4.1.1.-); phosphate butyryltransferase (EC 2.3.1.19); and butyrate kinase (EC 2.7.2.7). In some embodiments the one or more enzymes that catalyse the conversion of crotonyl-CoA to an alkene include phenyl acrylic acid decarboxylase enzyme (EC 4.1.1.-); acyl-CoA thioesterase (EC 3.1.2.-); phosphate butyryltransferase (EC 2.3.1.19); and butyrate kinase (EC 2.7.2.7).

[0039] In some embodiments the one or more enzymes that catalyse the conversion of crotonyl-CoA to an alkene include aldehyde dehydrogenase (EC 1.2.1.-) and/or alcohol dehydrogenase (EC 1.1.1.-); and geraniol isomerase (EC 5.4.4.4), which is also linalool dehydratase (EC 4.2.1.127).

[0040] In some embodiments the one or more enzymes that catalyse the conversion of crotonyl-CoA to an alkene include aldehyde dehydrogenase (EC 1.2.1.-) and/or alcohol dehydrogenase (EC 1.1.1.-); farnesol kinase (EC 2.7.1.-), geranylgeraniol kinase (EC 2.7.1.B19), hydroxyethylthiazole kinase (EC 2.7.1.50) and/or undecaprenol kinase (EC 2.7.1.66); 2-methyl-1,3-butadiene synthase (EC 4.2.3.27) and/or methylbutenol synthase.

[0041] In some embodiments the one or more enzymes that catalyse the conversion of crotonyl-CoA to an alkene include acyl-CoA thioesterase (EC 3.1.2.-); aldehyde dehydrogenase (EC 1.2.1.-) and/or alcohol dehydrogenase (EC 1.1.1.-); and geraniol isomerase (EC 5.4.4.4), which is also linalool dehydratase (EC 4.2.1.127).

[0042] In some embodiments the one or more enzymes that catalyse the conversion of crotonyl-CoA to an alkene include acyl-CoA thioesterase (EC 3.1.2.-); aldehyde dehydrogenase (EC 1.2.1.-) and/or alcohol dehydrogenase (EC 1.1.1.-); farnesol kinase (EC 2.7.1.-), geranylgeraniol kinase (EC 2.7.1.B19), hydroxyethylthiazole kinase (EC 2.7.1.50) and/or undecaprenol kinase (EC 2.7.1.66); 2-methyl-1,3-butadiene synthase (EC 4.2.3.27) and/or methylbutenol synthase.

[0043] In some embodiments the one or more enzymes that catalyse the conversion of crotonyl-CoA to an alkene include aldehyde ferredoxin oxidoreductase (EC 1.2.7.5); acyl-CoA thioesterase (EC 3.1.2.-); aldehyde dehydrogenase (EC 1.2.1.-) and/or alcohol dehydrogenase (EC 1.1.1.-); and geraniol isomerase (EC 5.4.4.4), which is also linalool dehydratase (EC 4.2.1.127).

[0044] In some embodiments the one or more enzymes that catalyse the conversion of crotonyl-CoA to an alkene include aldehyde ferredoxin oxidoreductase (EC 1.2.7.5); acyl-CoA thioesterase (EC 3.1.2.-); aldehyde dehydrogenase (EC 1.2.1.-) and/or alcohol dehydrogenase (EC 1.1.1.-); farnesol kinase (EC 2.7.1.-), geranylgeraniol kinase (EC 2.7.1.B19), hydroxyethylthiazole kinase (EC 2.7.1.50) and/or undecaprenol kinase (EC 2.7.1.66); 2-methyl-1,3-butadiene synthase (EC 4.2.3.27) and/or methylbutenol synthase.

[0045] In some embodiments the one or more enzymes that catalyse the conversion of crotonyl-CoA to an alkene include phosphate butyryltransferase (EC 2.3.1.19); butyrate kinase (EC 2.7.2.7); aldehyde dehydrogenase (EC 1.2.1.-) and/or alcohol dehydrogenase (EC 1.1.1.-); geraniol isomerase (EC 5.4.4.4), which is also linalool dehydratase (EC 4.2.1.127).

[0046] In some embodiments the one or more enzymes that catalyse the conversion of crotonyl-CoA to an alkene include phosphate butyryltransferase (EC 2.3.1.19); butyrate kinase (EC 2.7.2.7); aldehyde dehydrogenase (EC 1.2.1.-) and/or alcohol dehydrogenase (EC 1.1.1.-); farnesol kinase (EC 2.7.1.-), geranylgeraniol kinase (EC 2.7.1.B19), hydroxyethylthiazole kinase (EC 2.7.1.50) and/or undecaprenol kinase (EC 2.7.1.66); 2-methyl-1,3-butadiene synthase (EC 4.2.3.27) and/or methylbutenol synthase.

[0047] In some embodiments the one or more enzymes that catalyse the conversion of crotonyl-CoA to an alkene include phosphate butyryltransferase (EC 2.3.1.19); butyrate kinase (EC 2.7.2.7); aldehyde ferredoxin oxidoreductase (EC 1.2.7.5); aldehyde dehydrogenase (EC 1.2.1.-) and/or alcohol dehydrogenase (EC 1.1.1.-); and geraniol isomerase (EC 5.4.4.4), which is also linalool dehydratase (EC 4.2.1.127).

[0048] In some embodiments the one or more enzymes that catalyse the conversion of crotonyl-CoA to an alkene include phosphate butyryltransferase (EC 2.3.1.19); butyrate kinase (EC 2.7.2.7); aldehyde ferredoxin oxidoreductase (EC 1.2.7.5); aldehyde dehydrogenase (EC 1.2.1.-) and/or alcohol dehydrogenase (EC 1.1.1.-); farnesol kinase (EC 2.7.1.-), geranylgeraniol kinase (EC 2.7.1.B19), hydroxyethylthiazole kinase (EC 2.7.1.50) and/or undecaprenol kinase (EC 2.7.1.66); 2-methyl-1,3-butadiene synthase (EC 4.2.3.27) and/or methylbutenol synthase.

[0049] In some embodiments the one or more enzymes that catalyse the conversion of propionyl-CoA to an alkene include acetyl-CoA C-acetyltransferase (EC 2.3.1.9); acetoacetyl-CoA reductase (EC 1.1.1.36); enoyl-CoA hydratase 2 (EC 4.2.1.119); acyl-CoA thioesterase (EC 3.1.2.-); and phenyl acrylic acid decarboxylase (EC 4.1.1.-).

[0050] In some embodiments the one or more enzymes that catalyse the conversion of propionyl-CoA to an alkene include acetyl-CoA C-acetyltransferase (EC 2.3.1.9); acetoacetyl-CoA reductase (EC 1.1.1.36); enoyl-CoA hydratase 2 (EC 4.2.1.119); phosphate butyryltransferase (EC 2.3.1.19); butyrate kinase (EC 2.7.2.7); and phenyl acrylic acid decarboxylase (EC 4.1.1.-).

[0051] In some embodiments the one or more enzymes that catalyse the conversion of propionyl-CoA to an alkene include acetyl-CoA C-acetyltransferase (EC 2.3.1.9); 3-hydroxybutyryl-CoA dehydrogenase (EC 1.1.1.157); 3-hydroxybutyryl-CoA dehydratase (EC 4.2.1.55); acyl-CoA thioesterase (EC 3.1.2.-); and phenyl acrylic acid decarboxylase (EC 4.1.1.-).

[0052] In some embodiments the one or more enzymes that catalyse the conversion of propionyl-CoA to an alkene include acetyl-CoA C-acetyltransferase (EC 2.3.1.9); 3-hydroxybutyryl-CoA dehydrogenase (EC 1.1.1.157); 3-hydroxybutyryl-CoA dehydratase (EC 4.2.1.55); phosphate butyryltransferase (EC 2.3.1.19); butyrate kinase (EC 2.7.2.7); and phenyl acrylic acid decarboxylase (EC 4.1.1.-).

[0053] In some embodiments the one or more enzymes that catalyse the conversion of acryloyl-CoA to an alkene include acyl-CoA thioesterase (EC 3.1.2.-); and phenyl acrylic acid decarboxylase (EC 4.1.1.-).

[0054] In some embodiments the one or more enzymes that catalyse the conversion of acryloyl-CoA to an alkene include phosphate butyryltransferase (EC 2.3.1.19); butyrate kinase (EC 2.7.2.7); and phenyl acrylic acid decarboxylase (EC 4.1.1.-).

[0055] According to some embodiments of the recombinant microorganism according to the first aspect the heterologous nucleic acid sequence includes coding sequences that encode the enzyme acetyl-CoA C-acetyltransferase (EC 2.3.1.9); the enzyme 3-hydroxybutyryl-CoA dehydrogenase (EC 1.1.1.157); the enzyme 3-hydroxybutyryl-CoA dehydratase (EC 4.2.1.55); an acyl-CoA thioesterase enzyme (EC 3.1.2.-); an aldehyde dehydrogenase (EC 1.2.1.-) or an alcohol dehydrogenase enzyme (EC 1.1.1.-); and the enzyme geraniol isomerase (EC 5.4.4.4), which is also linalool dehydratase (EC 4.2.1.127).

[0056] According to some embodiments of the recombinant microorganism according to the first aspect, the heterologous nucleic acid sequence includes coding sequences that encode the enzyme Acetyl-CoA carboxylase (EC 6.4.1.2); the enzyme acetoacetyl-CoA synthase (EC 2.3.1.194); the enzyme acetoacetyl-CoA reductase (EC 1.1.1.36); the enzyme enoyl-CoA hydratase 2 (EC 4.2.1.119); an acyl-CoA thioesterase enzyme (EC 3.1.2.-); an aldehyde dehydrogenase (EC 1.2.1.-) or an alcohol dehydrogenase enzyme (EC 1.1.1.-); and the enzyme geraniol isomerase (EC 5.4.4.4), which is also linalool dehydratase (EC 4.2.1.127).

[0057] According to some embodiments of the recombinant microorganism according to the first aspect, the heterologous nucleic acid sequence includes coding sequences that encode the enzyme acetyl-CoA carboxylase (EC 6.4.1.2); a lactate CoA-transferase enzyme (EC 2.8.3.-); the enzyme lactoyl-CoA dehydratase (EC 4.2.1.54); an acyl-CoA thioesterase enzyme (EC 3.1.2.-); and a phenyl acrylic acid decarboxylase enzyme (EC 4.1.1.-).

[0058] According to some embodiments of the recombinant microorganism according to the first aspect, the heterologous nucleic acid sequence includes coding sequences that encode the enzyme 4-aminobutyrate aminotransferase (EC 2.6.1.19); the enzyme glutamate dehydrogenase (EC 1.4.1.2); the enzyme 2-hydroxyglutarate dehydrogenase (EC 1.1.99.2); the enzyme glutaconate CoA-transferase (EC 2.8.3.12); a 2-hydroxyglutaryl-CoA dehydratase enzyme (EC 4.2.1.-); the enzyme glutaconyl-CoA decarboxylase (EC 4.1.1.70); an acyl-CoA thioesterase enzyme (EC 3.1.2.-); an aldehyde dehydrogenase (EC 1.2.1.-) or an alcohol dehydrogenase enzyme (EC 1.1.1.-); and the enzyme geraniol isomerase (EC 5.4.4.4), which is also linalool dehydratase (EC 4.2.1.127).

[0059] According to some embodiments of the recombinant microorganism according to the first aspect, the heterologous nucleic acid sequence includes coding sequences that encode the enzyme 4-aminobutyrate aminotransferase (EC 2.6.1.19); the enzyme 4-hydroxybutyrate dehydrogenase (EC 1.1.1.61); a 4-hydroxybutyrate CoA-transferase enzyme (EC 2.8.3.-); the enzyme vinylacetyl-CoA-Delta-isomerase (EC 4.2.1.120); the enzyme 4-hydroxybutyryl-CoA dehydratase (EC 5.3.3.3); an acyl-CoA thioesterase enzyme (EC 3.1.2.-); an aldehyde/alcohol dehydrogenase enzyme (EC 1.1.1.- and/or EC 1.2.1.-); and the enzyme geraniol isomerase (EC 5.4.4.4), which is also linalool dehydratase (EC 4.2.1.127).

[0060] According to some embodiments of the recombinant microorganism according to the first aspect, the heterologous nucleic acid sequence includes coding sequences that encode the enzyme 4-aminobutyrate aminotransferase (EC 2.6.1.19); the enzyme glutamate dehydrogenase (EC 1.4.1.2); the enzyme 2-hydroxyglutarate dehydrogenase (EC 1.1.99.2); the enzyme glutaconate CoA-transferase (EC 2.8.3.12); a 2-hydroxyglutaryl-CoA dehydratase enzyme (EC 4.2.1.-); the enzyme glutaconyl-CoA decarboxylase (EC 4.1.1.70); the enzyme 4-hydroxybutyrate dehydrogenase (EC 1.1.1.61); a 4-hydroxybutyrate CoA-transferase enzyme (EC 2.8.3.-); the enzyme vinylacetyl-CoA-Delta-isomerase (EC 4.2.1.120); the enzyme 4-hydroxybutyryl-CoA dehydratase (EC 5.3.3.3); an acyl-CoA thioesterase enzyme (EC 3.1.2.-); an aldehyde dehydrogenase (EC 1.2.1.-) or an alcohol dehydrogenase enzyme (EC 1.1.1.-); and the enzyme geraniol isomerase (EC 5.4.4.4), which is also linalool dehydratase (EC 4.2.1.127).

[0061] According to some embodiments of the recombinant microorganism according to the first aspect, the heterologous nucleic acid sequence includes coding sequences that encode the enzyme 4-aminobutyrate aminotransferase (EC 2.6.1.19); the enzyme 4-hydroxybutyrate dehydrogenase (EC 1.1.1.61); a 4-hydroxybutyrate CoA-transferase enzyme (EC 2.8.3.-); the enzyme vinylacetyl-CoA-delta-isomerase (EC 4.2.1.120); the enzyme glutaconyl-CoA decarboxylase (EC 4.1.1.70); the enzyme 4-hydroxybutyryl-CoA dehydratase (EC 5.3.3.3); the enzyme trans-2-enoyl-CoA reductase (EC1.1.1.36); the enzyme acetyl-CoA C-acetyltransferase (EC 2.3.1.9); the enzyme 3-hydroxybutyryl-CoA dehydrogenase (EC 1.1.1.157); the enzyme 3-hydroxybutyryl-CoA dehydratase (EC 4.2.1.55); an acyl-CoA thioesterase enzyme (EC 3.1.2.-); and a phenyl acrylic acid decarboxylase enzyme (EC 4.1.1.-).

[0062] According to some embodiments of the recombinant microorganism according to the first aspect, the heterologous nucleic acid sequence includes coding sequences that encode the enzyme acetyl-CoA C-acetyltransferase (EC 2.3.1.9), the enzyme 3-hydroxy-3-methylglutaryl-CoA synthase (EC 2.3.3.10), the enzyme 3-methylglutaconyl-CoA hydratase (EC 4.2.1.18), and the enzyme 3-methylcrotonyl-CoA carboxylase (EC 6.4.1.4), an aldehyde dehydrogenase (EC 1.2.1.-) or an alcohol dehydrogenase enzyme (EC 1.1.1.-); and the enzyme geraniol isomerase (EC 5.4.4.4), which is also linalool dehydratase (EC 4.2.1.127).

[0063] According to some embodiments of the recombinant microorganism according to the first aspect, the heterologous nucleic acid sequence includes coding sequences that encode the enzyme acetyl-CoA C-acetyltransferase (EC 2.3.1.9), the enzyme 3-hydroxy-3-methylglutaryl-CoA synthase (EC 2.3.3.10), the enzyme 3-methylglutaconyl-CoA hydratase (EC 4.2.1.18), and the enzyme 3-methylcrotonyl-CoA carboxylase (EC 6.4.1.4), an aldehyde dehydrogenase (EC 1.2.1.-) or an alcohol dehydrogenase enzyme (EC 1.1.1.-); the enzyme farnesol kinase (EC 2.7.1.-), and/or the enzyme geranylgeraniol kinase (EC 2.7.1.B19), and/or the enzyme hydroxyethylthiazole kinase (EC 2.7.1.50) and/or the enzyme undecaprenol kinase (EC 2.7.1.66); and the enzyme 2-methyl-1,3-butadiene synthase (EC 4.2.3.27) and/or the enzyme methylbutenol synthase.

[0064] According to some embodiments of the recombinant microorganism according to the first aspect, the heterologous nucleic acid sequence includes coding sequences that encode the enzyme acetyl-CoA carboxylase (EC 6.4.1.2), the enzyme acetoacetyl-CoA synthase (EC 2.3.1.194), the enzyme 3-hydroxy-3-methylglutaryl-CoA synthase (EC 2.3.3.10), the enzyme 3-methylglutaconyl-CoA hydratase (EC 4.2.1.18), the enzyme 3-methylcrotonyl-CoA carboxylase (EC 6.4.1.4), an aldehyde dehydrogenase (EC 1.2.1.-) or an alcohol dehydrogenase enzyme (EC 1.1.1.-); and the enzyme geraniol isomerase (EC 5.4.4.4), which is also linalool dehydratase (EC 4.2.1.127).

[0065] According to some embodiments of the recombinant microorganism according to the first aspect, the heterologous nucleic acid sequence includes coding sequences that encode the enzyme acetyl-CoA carboxylase (EC 6.4.1.2), the enzyme acetoacetyl-CoA synthase (EC 2.3.1.194), the enzyme 3-hydroxy-3-methylglutaryl-CoA synthase (EC 2.3.3.10), the enzyme 3-methylglutaconyl-CoA hydratase (EC 4.2.1.18), the enzyme 3-methylcrotonyl-CoA carboxylase (EC 6.4.1.4), an aldehyde dehydrogenase (EC 1.2.1.-) or an alcohol dehydrogenase enzyme (EC 1.1.1.-); the enzyme farnesol kinase (EC 2.7.1.-), and/or the enzyme geranylgeraniol kinase (EC 2.7.1.B19), and/or the enzyme hydroxyethylthiazole kinase (EC 2.7.1.50) and/or the enzyme undecaprenol kinase (EC 2.7.1.66); and the enzyme 2-methyl-1,3-butadiene synthase (EC 4.2.3.27) and/or the enzyme methylbutenol synthase.

[0066] According to some embodiments of the recombinant microorganism according to the first aspect, the heterologous nucleic acid sequence includes coding sequences that encode the enzyme acetyl-CoA C-acetyltransferase (EC 2.3.1.9), the enzyme 3-hydroxybutyryl-CoA dehydrogenase (EC 1.1.1.157), the enzyme 3-hydroxybutyryl-CoA dehydratase (EC 4.2.1.55), an aldehyde dehydrogenase (EC 1.2.1.-) or an alcohol dehydrogenase enzyme (EC 1.1.1.-); and the geraniol isomerase (EC 5.4.4.4), which is also linalool dehydratase (EC 4.2.1.127).

[0067] According to some embodiments of the recombinant microorganism according to the first aspect, the heterologous nucleic acid sequence includes coding sequences that encode the enzyme acetyl-CoA C-acetyltransferase (EC 2.3.1.9), the enzyme 3-hydroxybutyryl-CoA dehydrogenase (EC 1.1.1.157), the enzyme 3-hydroxybutyryl-CoA dehydratase (EC 4.2.1.55), an aldehyde dehydrogenase (EC 1.2.1.-) or an alcohol dehydrogenase enzyme (EC 1.1.1.-); the enzyme farnesol kinase (EC 2.7.1.-), and/or the enzyme geranylgeraniol kinase (EC 2.7.1.B19), and/or the enzyme hydroxyethylthiazole kinase (EC 2.7.1.50) and/or the enzyme undecaprenol kinase (EC 2.7.1.66); and the enzyme 2-methyl-1,3-butadiene synthase (EC 4.2.3.27) and/or the enzyme methylbutenol synthase.

[0068] According to some embodiments of the recombinant microorganism according to the first aspect, the heterologous nucleic acid sequence includes coding sequences that encode the enzyme Acetyl-CoA carboxylase (EC 6.4.1.2), the enzyme acetoacetyl-CoA synthase (EC 2.3.1.194), the enzyme acetoacetyl-CoA reductase (EC 1.1.1.36), the enzyme enoyl-CoA hydratase 2 (EC 4.2.1.119), an aldehyde dehydrogenase (EC 1.2.1.-) or an alcohol dehydrogenase enzyme (EC 1.1.1.-); and the enzyme geraniol isomerase (EC 5.4.4.4), which is also linalool dehydratase (EC 4.2.1.127).

[0069] According to some embodiments of the recombinant microorganism according to the first aspect, the heterologous nucleic acid sequence includes coding sequences that encode the enzyme Acetyl-CoA carboxylase (EC 6.4.1.2), the enzyme acetoacetyl-CoA synthase (EC 2.3.1.194), the enzyme acetoacetyl-CoA reductase (EC 1.1.1.36), the enzyme enoyl-CoA hydratase 2 (EC 4.2.1.119), an aldehyde dehydrogenase (EC 1.2.1.-) or an alcohol dehydrogenase enzyme (EC 1.1.1.-); the enzyme farnesol kinase (EC 2.7.1.-), and/or the enzyme geranylgeraniol kinase (EC 2.7.1.B19), and/or the enzyme hydroxyethylthiazole kinase (EC 2.7.1.50) and/or the enzyme undecaprenol kinase (EC 2.7.1.66); and the enzyme 2-methyl-1,3-butadiene synthase (EC 4.2.3.27) and/or the enzyme methylbutenol synthase.

[0070] According to some embodiments of the recombinant microorganism according to the first aspect the heterologous nucleic acid sequence includes coding sequences that encode the enzyme acetyl-CoA C-acetyltransferase (EC 2.3.1.9); the enzyme 3-hydroxy-3-methylglutaryl-CoA synthase (EC 2.3.3.10); the enzyme 3-methylglutaconyl-CoA hydratase (EC 4.2.1.18); the enzyme 3-methyl-glutaconyl-CoA decarboxylase; an aldehyde/alcohol dehydrogenase enzyme (EC 1.1.1.- or EC 1.2.1.-); and the enzyme geraniol isomerase (EC 5.4.4.4), which is also linalool dehydratase (EC 4.2.1.127).

[0071] According to some embodiments of the recombinant microorganism according to the first aspect the heterologous nucleic acid sequence includes coding sequences that encode the enzyme acetyl-CoA carboxylase (EC 6.4.1.2); the enzyme acetoacetyl-CoA synthase (EC 2.3.1.194); the enzyme 3-hydroxy-3-methylglutaryl-CoA synthase (EC 2.3.3.10); the enzyme 3-methylglutaconyl-CoA hydratase (EC 4.2.1.18); the enzyme 3-methylglutaconyl-CoA decarboxylase; an aldehyde/alcohol dehydrogenase enzyme (EC 1.1.1.- or EC 1.2.1.-); and the enzyme geraniol isomerase (EC 5.4.4.4), which is also linalool dehydratase (EC 4.2.1.127).

[0072] According to some embodiments of the recombinant microorganism according to the first aspect the heterologous nucleic acid sequence includes coding sequences that encode the enzyme acetyl-CoA C-acetyltransferase (EC 2.3.1.9); the enzyme 3-hydroxy-3-methylglutaryl-CoA synthase (EC 2.3.3.10); the enzyme 3-methylglutaconyl-CoA hydratase (EC 4.2.1.18); the enzyme 3-methylglutaconyl-CoA decarboxylase; the enzyme farnesol kinase (EC 2.7.1.-), and/or the enzyme geranylgeraniol kinase (EC 2.7.1.B19) and/or the enzyme hydroxyethylthiazole kinase (EC 2.7.1.50) and/or the enzyme undecaprenol kinase (EC 2.7.1.66); and the enzyme 2-methyl-1,3-butadiene synthase (EC 4.2.3.27) and/or the enzyme methylbutenol synthase.

[0073] According to some embodiments of the recombinant microorganism according to the first aspect the heterologous nucleic acid sequence includes coding sequences that encode the enzyme acetyl-CoA carboxylase (EC 6.4.1.2); the enzyme acetoacetyl-CoA synthase (EC 2.3.1.194); the enzyme 3-hydroxy-3-methylglutaryl-CoA synthase (EC 2.3.3.10); the enzyme 3-methylglutaconyl-CoA hydratase (EC 4.2.1.18); the enzyme 3-methylglutaconyl-CoA decarboxylase; the enzyme farnesol kinase (EC 2.7.1.-), and/or the enzyme geranylgeraniol kinase (EC 2.7.1.B19) and/or the enzyme hydroxyethylthiazole kinase (EC 2.7.1.50) and/or the enzyme undecaprenol kinase (EC 2.7.1.66); and the enzyme 2-methyl-1,3-butadiene synthase (EC 4.2.3.27) and/or the enzyme methylbutenol synthase.

[0074] According to some embodiments of the recombinant microorganism according to the first aspect, the heterologous nucleic acid sequence includes coding sequences that encode the enzyme acetyl-CoA C-acetyltransferase (EC 2.3.1.9); the enzyme 3-hydroxybutyryl-CoA dehydrogenase (EC 1.1.1.157); the enzyme 3-hydroxybutyryl-CoA dehydratase (EC 4.2.1.55); an acyl-CoA thioesterase enzyme (EC 3.1.2.-); and a phenyl acrylic acid decarboxylase enzyme (EC 4.1.1.-).

[0075] According to some embodiments of the recombinant microorganism according to the first aspect, the heterologous nucleic acid sequence includes coding sequences that encode the enzyme Acetyl-CoA carboxylase (EC 6.4.1.2); the enzyme acetoacetyl-CoA synthase (EC 2.3.1.194); the enzyme acetoacetyl-CoA reductase (EC 1.1.1.36); the enzyme enoyl-CoA hydratase 2 (EC 4.2.1.119); an acyl-CoA thioesterase enzyme (EC 3.1.2.-); and a phenyl acrylic acid decarboxylase enzyme (EC 4.1.1.-).

[0076] According to some embodiments of the recombinant microorganism according to the first aspect, the heterologous nucleic acid sequence includes coding sequences that encode the enzyme acetyl-CoA C-acetyltransferase (EC 2.3.1.9); the enzyme 3-hydroxy-3-methylglutaryl-CoA synthase (EC 2.3.3.10); the enzyme 3-methylglutaconyl-CoA hydratase (EC 4.2.1.18); the enzyme 3-methylglutaconyl-CoA decarboxylase; a acyl-CoA thioesterase enzyme (EC 3.1.2.-); and the enzyme phenyl acrylic acid decarboxylase (EC 4.1.1.-).

[0077] According to some embodiments of the recombinant microorganism according to the first aspect, the heterologous nucleic acid sequence includes coding sequences that encode the enzyme Acetyl-CoA carboxylase (EC 6.4.1.2); the enzyme acetoacetyl-CoA synthase (EC 2.3.1.194); the enzyme 3-hydroxy-3-methylglutaryl-CoA synthase (EC 2.3.3.10); the enzyme 3-methylglutaconyl-CoA hydratase (EC 4.2.1.18); the enzyme 3-methylglutaconyl-CoA decarboxylase; a acyl-CoA thioesterase enzyme (EC 3.1.2.-); and the enzyme phenyl acrylic acid decarboxylase (EC 4.1.1.-).

[0078] According to some embodiments of the recombinant microorganism according to the first aspect, the heterologous nucleic acid sequence includes coding sequences that encode the enzyme 3-hydroxybutyryl-CoA dehydrogenase (EC 1.1.1.157); the enzyme 3-hydroxybutyryl-CoA dehydratase (EC 4.2.1.55); the enzyme trans-2-enoyl-CoA reductase (EC1.1.1.36); the enzyme acetyl-CoA C-acetyltransferase (EC 2.3.1.9); the enzyme 3-hydroxybutyryl-CoA dehydrogenase (EC 1.1.1.157); the enzyme 3-hydroxybutyryl-CoA dehydratase (EC 4.2.1.55); an acyl-CoA thioesterase enzyme (EC 3.1.2.-); and a phenyl acrylic acid decarboxylase enzyme (EC 4.1.1.-).

[0079] According to some embodiments of the recombinant microorganism according to the first aspect, the heterologous nucleic acid sequence includes coding sequences that encode the enzyme Acetyl-CoA carboxylase (EC 6.4.1.2); the enzyme acetoacetyl-CoA synthase (EC 2.3.1.194); the enzyme acetoacetyl-CoA reductase (EC 1.1.1.36); the enzyme enoyl-CoA hydratase 2 (EC 4.2.1.119); the enzyme trans-2-enoyl-CoA reductase (EC1.1.1.36); the enzyme acetyl-CoA C-acetyltransferase (EC 2.3.1.9); the enzyme 3-hydroxybutyryl-CoA dehydrogenase (EC 1.1.1.157); the enzyme 3-hydroxybutyryl-CoA dehydratase (EC 4.2.1.55); an acyl-CoA thioesterase enzyme (EC 3.1.2.-); and a phenyl acrylic acid decarboxylase enzyme (EC 4.1.1.-).

[0080] According to some embodiments of the recombinant microorganism according to the first aspect, the heterologous nucleic acid sequence includes coding sequences that encode the enzyme Acetyl-CoA carboxylase (EC 6.4.1.2); the enzyme acetoacetyl-CoA synthase (EC 2.3.1.194); the enzyme acetoacetyl-CoA reductase (EC 1.1.1.36); the enzyme enoyl-CoA hydratase 2 (EC 4.2.1.119); the enzyme trans-2-enoyl-CoA reductase (EC1.1.1.36); the enzyme acetyl-CoA C-acetyltransferase (EC 2.3.1.9); the enzyme 3-hydroxybutyryl-CoA dehydrogenase (EC 1.1.1.157); the enzyme 3-hydroxybutyryl-CoA dehydratase (EC 4.2.1.55); an acyl-CoA thioesterase enzyme (EC 3.1.2.-); and a phenyl acrylic acid decarboxylase enzyme (EC 4.1.1.-).

[0081] According to some embodiments of the recombinant microorganism according to the first aspect, the heterologous nucleic acid sequence includes coding sequences that encode the enzyme 3-hydroxybutyryl-CoA dehydrogenase (EC 1.1.1.157); the enzyme 3-hydroxybutyryl-CoA dehydratase (EC 4.2.1.55); the enzyme trans-2-enoyl-CoA reductase (EC1.1.1.36); the enzyme acetyl-CoA C-acetyltransferase (EC 2.3.1.9); the enzyme 3-hydroxybutyryl-CoA dehydrogenase (EC 1.1.1.157); the enzyme 3-hydroxybutyryl-CoA dehydratase (EC 4.2.1.55); a acyl-CoA thioesterase enzyme (EC 3.1.2.-); and a phenyl acrylic acid decarboxylase enzyme (EC 4.1.1.-).

[0082] According to some embodiments of the recombinant microorganism according to the first aspect, the heterologous nucleic acid sequence includes coding sequences that encode the enzyme 4-aminobutyrate aminotransferase (EC 2.6.1.19); the enzyme 4-hydroxybutyrate dehydrogenase (EC 1.1.1.61); a 4-hydroxybutyrate CoA-transferase enzyme (EC 2.8.3.-); the enzyme vinylacetyl-CoA-delta-isomerase (EC 4.2.1.120); the enzyme 4-hydroxybutyryl-CoA dehydratase (EC 5.3.3.3); an acyl-CoA thioesterase enzyme (EC 3.1.2.-); and the enzyme phenyl acrylic acid decarboxylase (EC 4.1.1.-).

[0083] According to some embodiments of the recombinant microorganism according to the first aspect, the heterologous nucleic acid sequence includes coding sequences that encode the enzyme 4-aminobutyrate aminotransferase (EC 2.6.1.19); the enzyme glutamate dehydrogenase (EC 1.4.1.2); the enzyme 2-hydroxyglutarate dehydrogenase (EC 1.1.99.2); the enzyme glutaconate CoA-transferase (EC 2.8.3.12); the enzyme 2-hydroxyglutaryl-CoA dehydratase (EC 4.2.1.-); the enzyme glutaconyl-CoA decarboxylase (EC 4.1.1.70); an acyl-CoA thioesterase enzyme (EC 3.1.2.-); and the enzyme phenyl acrylic acid decarboxylase (EC 4.1.1.-).

[0084] According to some embodiments of the recombinant microorganism according to the first aspect, the heterologous nucleic acid sequence includes coding sequences that encode the enzyme 2-oxoglutarate/butyrate ferredoxin oxidoreductase (EC 1.2.7.3); the enzyme pyruvate/2-oxobutyrate ferredoxin oxidoreductase (EC 1.2.7.1); the enzyme acetyl-CoA C-acetyltransferase (EC 2.3.1.9); the enzyme 3-hydroxybutyryl-CoA dehydrogenase (EC 1.1.1.157); the enzyme 3-hydroxybutyryl-CoA dehydratase (EC 4.2.1.55); an acyl-CoA thioesterase enzyme (EC 3.1.2.-); and a phenyl acrylic acid decarboxylase enzyme (EC 4.1.1.-).

[0085] According to some embodiments of the recombinant microorganism according to the first aspect, the heterologous nucleic acid sequence includes coding sequences that encode the enzyme 2-oxoglutarate/butyrate ferredoxin oxidoreductase (EC 1.2.7.3); the enzyme pyruvate/2-oxobutyrate ferredoxin oxidoreductase (EC 1.2.7.1); the enzyme acetyl-CoA C-acetyltransferase (EC 2.3.1.9); the enzyme acetoacetyl-CoA reductase (EC 1.1.1.36); the enzyme enoyl-CoA hydratase 2 (EC 4.2.1.119); an acyl-CoA thioesterase enzyme (EC 3.1.2.-); and a phenyl acrylic acid decarboxylase enzyme (EC 4.1.1.-).

[0086] According to some embodiments of the recombinant microorganism according to the first aspect, the heterologous nucleic acid sequence includes coding sequences that encode the enzyme 2-oxoglutarate/butyrate ferredoxin oxidoreductase (EC 1.2.7.3); the enzyme pyruvate/2-oxobutyrate ferredoxin oxidoreductase (EC 1.2.7.1); the enzyme acetyl-CoA C-acetyltransferase (EC 2.3.1.9); the enzyme 3-hydroxybutyryl-CoA dehydrogenase (EC 1.1.1.157); the enzyme 3-hydroxybutyryl-CoA dehydratase (EC 4.2.1.55); the enzyme phosphate butyryltransferase (EC 2.3.1.19); the enzyme butyrate kinase (EC 2.7.2.7); and a phenyl acrylic acid decarboxylase enzyme (EC 4.1.1.-).

[0087] According to some embodiments of the recombinant microorganism according to the first aspect, the heterologous nucleic acid sequence includes coding sequences that encode the enzyme 2-oxoglutarate/butyrate ferredoxin oxidoreductase (EC 1.2.7.3); the enzyme pyruvate/2-oxobutyrate ferredoxin oxidoreductase (EC 1.2.7.1); the enzyme acetyl-CoA C-acetyltransferase (EC 2.3.1.9); the enzyme acetoacetyl-CoA reductase (EC 1.1.1.36); the enzyme enoyl-CoA hydratase 2 (EC 4.2.1.119); the enzyme phosphate butyryltransferase (EC 2.3.1.19); the enzyme butyrate kinase (EC 2.7.2.7); and a phenyl acrylic acid decarboxylase enzyme (EC 4.1.1.-).

[0088] According to some embodiments of the recombinant microorganism according to the first aspect, the heterologous nucleic acid sequence includes coding sequences that encode the enzyme 2-oxoglutarate/butyrate ferredoxin oxidoreductase (EC 1.2.7.3); the enzyme pyruvate/2-oxobutyrate ferredoxin oxidoreductase (EC 1.2.7.1); the enzyme acetyl-CoA C-acetyltransferase (EC 2.3.1.9); the enzyme 3-hydroxybutyryl-CoA dehydrogenase (EC 1.1.1.157); the enzyme 3-hydroxybutyryl-CoA dehydratase (EC 4.2.1.55); the enzyme phosphate butyryltransferase (EC 2.3.1.19); the enzyme butyrate kinase (EC 2.7.2.7); and a phenyl acrylic acid decarboxylase enzyme (EC 4.1.1.-).

[0089] According to some embodiments of the recombinant microorganism according to the first aspect, the heterologous nucleic acid sequence includes coding sequences that encode the enzyme 2-oxoglutarate/butyrate ferredoxin oxidoreductase (EC 1.2.7.3); the enzyme pyruvate/2-oxobutyrate ferredoxin oxidoreductase (EC 1.2.7.1); the enzyme acetyl-CoA C-acetyltransferase (EC 2.3.1.9); the enzyme acetoacetyl-CoA reductase (EC 1.1.1.36); the enzyme enoyl-CoA hydratase 2 (EC 4.2.1.119); the enzyme phosphate butyryltransferase (EC 2.3.1.19); the enzyme butyrate kinase (EC 2.7.2.7); and a phenyl acrylic acid decarboxylase enzyme (EC 4.1.1.-).

[0090] According to some embodiments of the recombinant microorganism according to the first aspect, the heterologous nucleic acid sequence includes coding sequences that encode a lactate CoA-transferase enzyme (EC 2.8.3.-); the enzyme lactoyl-CoA dehydratase (EC 4.2.1.54); the enzyme lcdAB; the enzyme propionyl-CoA synthase (EC 1.3.1.84); the enzyme acetyl-CoA C-acetyltransferase (EC 2.3.1.9); the enzyme 3-hydroxybutyryl-CoA dehydrogenase (EC 1.1.1.157); the enzyme 3-hydroxybutyryl-CoA dehydratase (EC 4.2.1.55); an acyl-CoA thioesterase enzyme (EC 3.1.2.-); and a phenyl acrylic acid decarboxylase enzyme (EC 4.1.1.-).

[0091] According to some embodiments of the recombinant microorganism according to the first aspect, the heterologous nucleic acid sequence includes coding sequences that encode a lactate CoA-transferase enzyme (EC 2.8.3.-); the enzyme lactoyl-CoA dehydratase (EC 4.2.1.54); the enzyme lcdAB; the enzyme propionyl-CoA synthase (EC 1.3.1.84); the enzyme acetyl-CoA C-acetyltransferase (EC 2.3.1.9); the enzyme acetoacetyl-CoA reductase (EC 1.1.1.36); the enzyme enoyl-CoA hydratase 2 (EC 4.2.1.119); an acyl-CoA thioesterase enzyme (EC 3.1.2.-); and a phenyl acrylic acid decarboxylase enzyme (EC 4.1.1.-).

[0092] According to some embodiments of the recombinant microorganism according to the first aspect, the heterologous nucleic acid sequence includes a coding sequences that encode a lactate CoA-transferase enzyme (EC 2.8.3.-); the enzyme lactoyl-CoA dehydratase (EC 4.2.1.54); the enzyme lcdAB; propionyl-CoA synthase (EC 1.3.1.84); the enzyme acetyl-CoA C-acetyltransferase (EC 2.3.1.9); the enzyme acetoacetyl-CoA reductase (EC 1.1.1.36); the enzyme enoyl-CoA hydratase 2 (EC 4.2.1.119); the enzyme phosphate butyryltransferase (EC 2.3.1.19); the enzyme butyrate kinase (EC 2.7.2.7); and a phenyl acrylic acid decarboxylase enzyme (EC 4.1.1.-).

[0093] According to some embodiments of the recombinant microorganism according to the first aspect, the heterologous nucleic acid sequence includes coding sequences that encode a lactate CoA-transferase enzyme (EC 2.8.3.-); the enzyme lactoyl-CoA dehydratase (EC 4.2.1.54); the enzyme lcdAB; propionyl-CoA synthase (EC 1.3.1.84); the enzyme acetyl-CoA C-acetyltransferase (EC 2.3.1.9); the enzyme 3-hydroxybutyryl-CoA dehydrogenase (EC 1.1.1.157); the enzyme 3-hydroxybutyryl-CoA dehydratase (EC 4.2.1.55); the enzyme phosphate butyryltransferase (EC 2.3.1.19); the enzyme butyrate kinase (EC 2.7.2.7); and a phenyl acrylic acid decarboxylase enzyme (EC 4.1.1.-).

[0094] According to some embodiments of the recombinant microorganism according to the first aspect, the heterologous nucleic acid sequence includes coding sequences that encode a lactate CoA-transferase enzyme (EC 2.8.3.-); the enzyme lactoyl-CoA dehydratase (EC 4.2.1.54); an acyl-CoA thioesterase enzyme (EC 3.1.2.-); and a phenyl acrylic acid decarboxylase enzyme (EC 4.1.1.-).

[0095] According to some embodiments of the recombinant microorganism according to the first aspect, the heterologous nucleic acid sequence includes coding sequences that encode the enzyme acetyl-CoA carboxylase (EC 6.4.1.2); the enzyme malonyl CoA reductase (EC 1.2.1.75); the enzyme malonyl CoA reductase (EC 1.1.1.298); the enzyme propionyl-CoA synthase (EC 6.2.1.36); the enzyme propionyl-CoA synthase/acryloyl-CoA synthase (EC 4.2.1.116); the enzyme propionyl-CoA synthase (EC 1.3.1.84); the enzyme acetyl-CoA C-acetyltransferase (EC 2.3.1.9); the enzyme acetoacetyl-CoA reductase (EC 1.1.1.36); the enzyme enoyl-CoA hydratase 2 (EC 4.2.1.119); an acyl-CoA thioesterase enzyme (EC 3.1.2.-); and a phenyl acrylic acid decarboxylase enzyme (EC 4.1.1.-).

[0096] According to some embodiments of the recombinant microorganism according to the first aspect, the heterologous nucleic acid sequence includes coding sequences that encode the enzyme acetyl-CoA carboxylase (EC 6.4.1.2); the enzyme malonyl CoA reductase (EC 1.2.1.75); the enzyme malonyl CoA reductase (EC 1.1.1.298); the enzyme propionyl-CoA synthase (EC 6.2.1.36); the enzyme propionyl-CoA synthase/acryloyl-CoA synthase (EC 4.2.1.116); the enzyme propionyl-CoA synthase (EC 1.3.1.84); the enzyme acetyl-CoA C-acetyltransferase (EC 2.3.1.9); the enzyme 3-hydroxybutyryl-CoA dehydrogenase (EC 1.1.1.157); the enzyme 3-hydroxybutyryl-CoA dehydratase (EC 4.2.1.55); an acyl-CoA thioesterase enzyme (EC 3.1.2.-); and a phenyl acrylic acid decarboxylase enzyme (EC 4.1.1.-).

[0097] According to some embodiments of the recombinant microorganism according to the first aspect, the heterologous nucleic acid sequence includes coding sequences that encode the enzyme acetyl-CoA carboxylase (EC 6.4.1.2); the enzyme malonyl CoA reductase (EC 1.2.1.75); the enzyme malonyl CoA reductase (EC 1.1.1.298); the enzyme propionyl-CoA synthase (EC 6.2.1.36); the enzyme propionyl-CoA synthase/acryloyl-CoA synthase (EC 4.2.1.116); the enzyme propionyl-CoA synthase (EC 1.3.1.84); the enzyme acetyl-CoA C-acetyltransferase (EC 2.3.1.9); the enzyme acetoacetyl-CoA reductase (EC 1.1.1.36); the enzyme enoyl-CoA hydratase 2 (EC 4.2.1.119); the enzyme phosphate butyryltransferase (EC 2.3.1.19); the enzyme butyrate kinase (EC 2.7.2.7); and a phenyl acrylic acid decarboxylase enzyme (EC 4.1.1.-).

[0098] According to some embodiments of the recombinant microorganism according to the first aspect, the heterologous nucleic acid sequence includes coding sequences that encode the enzyme acetyl-CoA carboxylase (EC 6.4.1.2); the enzyme malonyl CoA reductase (EC 1.2.1.75); the enzyme malonyl CoA reductase (EC 1.1.1.298); the enzyme propionyl-CoA synthase (EC 6.2.1.36); the enzyme propionyl-CoA synthase/acryloyl-CoA synthase (EC 4.2.1.116); the enzyme propionyl-CoA synthase (EC 1.3.1.84); the enzyme acetyl-CoA C-acetyltransferase (EC 2.3.1.9); the enzyme 3-hydroxybutyryl-CoA dehydrogenase (EC 1.1.1.157); the enzyme 3-hydroxybutyryl-CoA dehydratase (EC 4.2.1.55); the enzyme phosphate butyryltransferase (EC 2.3.1.19); the enzyme butyrate kinase (EC 2.7.2.7); and a phenyl acrylic acid decarboxylase enzyme (EC 4.1.1.-).

[0099] According to some embodiments of the recombinant microorganism according to the first aspect, the heterologous nucleic acid sequence includes coding sequences that encode the enzyme acetyl-CoA carboxylase (EC 6.4.1.2); the enzyme malonyl CoA reductase (malonate semialdehyde-forming) (EC 1.2.1.75); the enzyme 3-hydroxypropionate dehydrogenase (EC 1.1.1.298); the enzyme 3-hydroxypropionyl-CoA synthase (EC 6.2.1.36); the enzyme hydroxypropionyl-CoA dehydratase (EC 4.2.1.116); an acyl-CoA thioesterase enzyme (EC 3.1.2.-); and a phenyl acrylic acid decarboxylase enzyme (EC 4.1.1.-).

[0100] According to some embodiments of the recombinant microorganism according to the first aspect, the heterologous nucleic acid sequence includes coding sequences that encode the enzyme acetoacetyl-Coenzyme A synthase thiolase (EC 2.3.1.9); the enzyme phosphate butyryltransferase (EC 2.3.1.19); the enzyme butyrate kinase (EC 2.7.2.7); the enzyme acetyl-CoA carboxylase (EC 6.4.1.2); the enzyme acetoacetyl-CoA synthase (EC 2.3.1.194); the enzyme 3-hydroxy-3-methylglutaryl-CoA synthase (EC 2.3.3.10); the enzyme 3-methylglutaconyl-CoA hydratase (EC 4.2.1.18); the enzyme 3-methylglutaconyl-CoA decarboxylase; an acyl-CoA thioesterase enzyme (EC 3.1.2.-); an aldehyde dehydrogenase (EC 1.2.1.-) or an alcohol dehydrogenase enzyme (EC 1.1.1.-); the enzyme aldehyde ferredoxin oxidoreductase (EC 1.2.7.5); the enzyme geraniol isomerase (EC 5.4.4.4), which is also linalool dehydratase (EC 4.2.1.127); the enzyme farnesol kinase (EC 2.7.1.-); and the enzyme methylbutenol synthase.

[0101] In some embodiments a microorganism disclosed herein is anaerobic. The microorganism may be an anaerobic cell. According to some embodiments of the recombinant microorganism according to the first aspect, the endogenous enzymes that convert one or both of carbon monoxide and carbon dioxide to acetyl-CoA are enzymes of the Wood-Ljungdahl pathway. In some embodiments the recombinant microorganism includes sequences encoding endogenous enzymes of all enzymes of the Wood-Ljungdahl pathway. The recombinant microorganism may express endogenous enzymes of the Wood-Ljungdahl pathway that catalyse the conversion of one or both of carbon monoxide and carbon dioxide to acetyl-CoA are enzymes. In some embodiments the recombinant microorganism includes sequences encoding endogenous enzymes of all enzymes of the Wood-Ljungdahl pathway. The recombinant microorganism may express all enzymes of the Wood-Ljungdahl pathway. In some embodiments the recombinant microorganism is caroxyotrop. In some embodiments the recombinant microorganism is acetogen.

[0102] According to some embodiments of the recombinant microorganism according to the first aspect, all coding sequences are operationally linked to the same common transcriptional promoter. According to some embodiments the heterologous gene sequence is included in a heterologous nucleic acid molecule or in the microorganism's chromosome. According to some embodiments the microorganism is of the genus Clostridium. In some embodiments the microorganism may be Clostridium ljungdahlii. The microorganism may also be Clostridium autoethanogenum. In some embodiments the microorganism may be Clostridium carboxidivorans. In some embodiments the microorganism may be Clostridium aceticum. The microorganism may in some embodiments be Clostridium drakei. In some embodiments the microorganism may be Clostridium scatologenes. In some embodiments the microorganism may be Clostridium ragsdalei. The microorganism may in some embodiments be Clostridium formicoaceticum. In some embodiments the microorganism may be Clostridium magnum. In some embodiments the microorganism may be Clostridium coccoides. The microorganism may in some embodiments be Clostridium difficile. In some embodiments the microorganism may be Clostridium formicaceticum. The microorganism may in some embodiments be Clostridium fervidus. In some embodiments the microorganism may be Clostridium thermocellum.

[0103] According to some embodiments the recombinant microorganism according to the first aspect is of the genus Moorella. In some embodiments the microorganism may be Moorella thermoacetica. In some embodiments the microorganism may be Moorella thermautotrophica. The microorganism may in some embodiments be Moorella mulderi. In some embodiments the microorganism may be Moorella stamsii. In some embodiments the microorganism may be Moorella glycerini. In some embodiments the microorganism is of the genus Acetobacterium. The microorganism may in some embodiments be Acetobacterium woodii. In some embodiments the microorganism may be Acetobacterium bakii. In some embodiments the microorganism may be Acetobacterium carbinolicum. The microorganism may in some embodiments be Acetobacterium dehalogenans. In some embodiments the microorganism may be Acetobacterium malicum. The microorganism may in some embodiments be Acetobacterium paludosum. In some embodiments the microorganism may be Acetobacterium fimetarium. The microorganism may in some embodiments be Acetobacterium tundrae. In some embodiments the microorganism may be Acetobacterium wieringae. In some embodiments the microorganism may be Acetobacterium psammolithicum.

[0104] According to some embodiments the microorganism according to the first aspect is of the genus Sporomusa. In some embodiments the microorganism may be Sporomusa ovata. In some embodiments the microorganism may be Sporomusa silvacetica. The microorganism may in some embodiments be Sporomusa sphaeroides. In some embodiments the microorganism may be Sporomusa termitida. The microorganism may in some embodiments be Sporomusa acidovorans. In some embodiments the microorganism may be Sporomusa aerivorans. In some embodiments the microorganism Sporomusa paucivorans acidovorans. According to some embodiments the microorganism is of the genus Blautia. In some embodiments the microorganism may be Blautia producta. In some embodiments the microorganism may be Blautia wexlerae. The microorganism may in some embodiments be Blautia hydrogenotrophica. In some embodiments the microorganism may be Blautia hansenii. According to some embodiments the microorganism is of the genus Carboxydocella. In some embodiments the microorganism may be Carboxydocella sporoproducens. In some embodiments the microorganism may be Carboxydocella ferrireducens. The microorganism may in some embodiments be Carboxydocella thermautotrophica. According to some embodiments the microorganism is of the genus Carboxydocella. In some embodiments the microorganism may be Carboxydocella sporoproducens. According to some embodiments the microorganism is of the genus Carboxydothermus. In some embodiments the microorganism may be Carboxydothermus hydrogenoformans. In some embodiments the microorganism may be Carboxydothermus ferrireducens. The microorganism may in some embodiments be Carboxydothermus pertinax. In some embodiments the microorganism may be Carboxydothermus islandicus. In some embodiments the microorganism may be Carboxydothermus siderophilus. According to some embodiments the microorganism is of the genus Desulfotomaculum. In some embodiments the microorganism may be Desulfotomaculum carboxydivorans. In some embodiments the microorganism may be Desulfotomaculum gibsoniae. The microorganism may in some embodiments be Desulfotomaculum kuznetsovii. In some embodiments the microorganism may be Desulfotomaculum thermobenzoicum subsp. thermosyntrophicum. In some embodiments the microorganism may be Desulfotomaculum acetoxidans. The microorganism may in some embodiments be Desulfotomaculum alcoholivorax. In some embodiments the microorganism may be Desulfotomaculum carboxydivorans. In some embodiments the microorganism may be Desulfotomaculum sapomandens. The microorganism may in some embodiments be Desulfotomaculum thermocisternum.

[0105] According to some embodiments the microorganism according to the first aspect is of the genus Desulfovibrio. In some embodiments the microorganism may be Desulfovibrio vulgaris. In some embodiments the microorganism may be Desulfovibrio alaskensis. The microorganism may in some embodiments be Desulfovibrio desulfuricans. In some embodiments the microorganism may be Desulfovibrio vulgaris. According to some embodiments the microorganism is of the genus Mycobacterium. In some embodiments the microorganism may be Mycobacterium smegmatis. In some embodiments the microorganism may be Mycobacterium gordonae. The microorganism may in some embodiments be Mycobacterium tuberculosis. According to some embodiments the microorganism is of the genus Ruminococcus. In some embodiments the microorganism may be Ruminococcus hydrogenotrophicus. The microorganism may in some embodiments be Ruminococcus schinkii. In some embodiments the microorganism may be Ruminococcus productus.

[0106] According to some embodiments the recombinant microorganism according to the first aspect is a species of Butyribacterium methylotrophicum, Alkalibaculum bacchii, Aecetoariaerobium riotera, Eubacterium limosum, Desulfitbacterium hafhierise, Peptostreptococcus productus, Rhodospirillum rubrum, Thermoanaerobacter kiuvi, Oxobacter pfennigii, Acetohalobium arabaticum, Carbophilus carboxidus, Cloacibacillus evryensis, Hydrogenophaga pseudoflava, Rhodopseudomonas palustris, Pseudomonas gazotropha, Ralstonia eutropha, Calderihabitans maritimus, Caloribacterium cisternae, Carboxydobrachium pacificum, Desulfurispora thermophila, Dictyoglomus thermophilum, Hydrogenophilus islandicus, Thermincola carboxydiphila, Thermincola ferriacetica, Thermincola potens, Thermoacetogenium phaeum, Thermoanaerobacter kivui, Thermoanaerobacter thermohydrosulfuricus subsp. carboxydovorans, Thermosinus carboxydivorans, Oligotropha carboxidovorans, Desulfosporosinus meridiei, Dehalococcoides mccartyi, Desulfatibacillum aliphaticivorans, Desulfobacterium autotrophicum, Desulfobacula toluolica, Desulfospira joergensenii, Desulfosporosinus orientis, Desulfosporosinus youngiae, Desulfovermiculus halophilus, Desulfurispora thermophila, Holophaga foetida, Methanobrevibacter arboriphilus, Orenia salinaria, Paenibacillus polymyxa, Tindallia californiensis, Anoxybacillus flavithermus, Desulfovirgula thermocuniculi, Thermosediminibacter oceani, Candidatus Scalindua brodae, Acetoanaerobium noterae, Ammonifex degensii, Acetitomaculum ruminis, Acetoanaerobium romashkovil, Acetonema longum, Bryanella formatexigens, Caloramator fervidus, Natroniella acetigena, Natronincola histinovorans, Syntrophococcus sucromutans, Treponema primitia, Pseudomonas carboxydohyrogena, Pseudomonas thermocarboxydovorans, Bradyrhizobium japonicum, Streptomyces thermoautotrophicus, Bacillus schlegelii, Caldanaerobacter subterraneus, Thermolithobacter carboxydivorans, Thermococcus onnurineus, Thermofilum carboxyditrophus, Archaeoglobus fulgidus, Desulfomonile tiedjei, Thermoproteus tenax or Rubrivivax gelatinosa.

[0107] According to a second aspect, there is provided a recombinant nucleic acid molecule. The recombinant nucleic acid molecule contains a nucleic acid sequence encoding one or more enzymes that allow the conversion of acetyl-CoA to one or more alkanes and/or alkenes with a main chain of 2 to 6 carbon atoms. In embodiments where the recombinant nucleic acid molecule includes more than one coding sequences or a combination of more than one coding sequences that encode one or more enzymes that catalyse the conversion of acetyl-CoA to one or more alkanes and/or alkenes with a main chain of 2 to 6 carbon atoms, the recombinant nucleic acid molecule may not include at least one of the respective coding sequences. In some embodiments the recombinant nucleic acid molecule does not include at least one coding sequence or a combination of coding sequences that encode one or more enzymes that catalyse the conversion of acetyl-CoA to one or more alkanes and/or alkenes with a main chain of 2 to 6 carbon atoms.

[0108] In some embodiments the recombinant nucleic acid molecule contains a nucleic acid sequence encoding one or more enzymes that allow the conversion of acetyl-CoA to one or more alkenes with a main chain of 2 to 5 carbon atoms. The recombinant nucleic acid molecule may include one or more coding sequences encoding one or more enzymes that catalyse the conversion of acetyl-CoA to crotonyl-CoA, and that further catalyse the conversion of crotonyl-CoA to an alkene. The recombinant nucleic acid molecule may also include one or more coding sequences encoding one or more enzymes that catalyse the conversion of acetyl-CoA to 3-methylcrotonyl-CoA, and that further catalyse the conversion of 3-methylcrotonyl-CoA to an alkene. The recombinant nucleic acid molecule may also include one or more coding sequences encoding one or more enzymes that catalyse the conversion of acetyl-CoA to propionyl-CoA, and that further catalyse the conversion of propionyl-CoA to an alkene. Each coding sequence included in the recombinant nucleic acid molecule is operationally linked to a transcriptional promoter.

[0109] In some embodiments the recombinant nucleic acid molecule contains a coding sequence that encodes a nitrogenase enzyme EC 1.18.6.1 or EC 1.19.6.1.

[0110] In some embodiments of the recombinant nucleic acid molecule according to the second aspect the one or more enzymes that catalyse the conversion of acetyl-CoA to crotonyl-CoA include acetyl-CoA carboxylase (EC 6.4.1.2); acetoacetyl-CoA synthase (EC 2.3.1.194); acetoacetyl-CoA reductase (EC 1.1.1.36); and enoyl-CoA hydratase 2 (EC 4.2.1.119).

[0111] In some embodiments of the recombinant nucleic acid molecule according to the second aspect the one or more enzymes that catalyse the conversion of acetyl-CoA to crotonyl-CoA include acetyl-CoA C-acetyltransferase (EC 2.3.1.9); 3-hydroxybutyryl-CoA dehydrogenase (EC 1.1.1.157); and 3-hydroxybutyryl-CoA dehydratase. In some embodiments the one or more enzymes that catalyse the conversion of acetyl-CoA to crotonyl-CoA include 4-aminobutyrate aminotransferase (EC 2.6.1.19); glutamate dehydrogenase (EC 1.4.1.2); 2-hydroxyglutarate dehydrogenase (EC 1.1.99.2); glutaconate CoA-transferase (EC 2.8.3.12); 2-hydroxyglutaryl-CoA dehydratase (EC 4.2.1.-); and glutaconyl-CoA decarboxylase (EC 4.1.1.70). In some embodiments the one or more enzymes that catalyse the conversion of acetyl-CoA to crotonyl-CoA include 4-aminobutyrate aminotransferase (EC 2.6.1.19); 4-hydroxybutyrate dehydrogenase (EC 1.1.1.61); 4-hydroxybutyrate CoA-transferase (EC 2.8.3.-); vinylacetyl-CoA-Delta-isomerase (EC 4.2.1.120); and 4-hydroxy-butyryl-CoA dehydratase (EC 5.3.3.3).

[0112] In some embodiments of the recombinant nucleic acid molecule according to the second aspect the one or more enzymes that catalyse the conversion of acetyl-CoA to 3-methylcrotonyl-CoA include acetyl-CoA C-acetyltransferase (EC 2.3.1.9); 3-hydroxy-3-methylglutaryl-CoA synthase (EC 2.3.3.10); 3-methylglutaconyl-CoA hydratase (EC 4.2.1.18); and 3-methylcrotonyl-CoA carboxylase (EC 6.4.1.4). In some embodiments the one or more enzymes that catalyse the conversion of acetyl-CoA to 3-methylcrotonyl-CoA include acetyl-CoA carboxylase (EC 6.4.1.2); acetoacetyl-CoA synthase (EC 2.3.1.194); 3-hydroxy-3-methylglutaryl-CoA synthase (EC 2.3.3.10); 3-methyl-glutaconyl-CoA hydratase (EC 4.2.1.18); and 3-methylcrotonyl-CoA carboxylase (EC 6.4.1.4).

[0113] In some embodiments of the recombinant nucleic acid molecule according to the second aspect the one or more enzymes that catalyse the conversion of acetyl-CoA to propionyl-CoA include acetyl-CoA carboxylase (EC 6.4.1.2); malonyl CoA reductase (EC 1.2.1.75); malonyl CoA reductase (EC 1.1.1.298); propionyl-CoA synthase (EC 6.2.1.36); propionyl-CoA synthase/acryloyl-CoA synthase (EC 4.2.1.116); and propionyl-CoA synthase (EC 1.3.1.84).

[0114] In some embodiments of the recombinant nucleic acid molecule according to the second aspect the one or more enzymes that catalyse the conversion of acetyl-CoA to propionyl-CoA include acetyl-CoA carboxylase (EC 6.4.1.2); methylmalonyl-CoA mutase (EC 5.4.99.2); and methylmalonyl-CoA decarboxylase (EC 4.1.1.41). In some embodiments the one or more enzymes that catalyse the conversion of acetyl-CoA to propionyl-CoA include 2-oxoglutarate/butyrate ferredoxin oxidoreductase (EC 1.2.7.3) and/or pyruvate/2-oxobutyrate ferredoxin oxidoreductase (EC 1.2.7.1). In some embodiments the one or more enzymes that catalyse the conversion of acetyl-CoA to propionyl-CoA include lactate CoA-transferase (EC 2.8.3.-); lactoyl-CoA dehydratase (EC 4.2.1.54); and propionyl-CoA synthase (EC 1.3.1.84).

[0115] In some embodiments of the recombinant nucleic acid molecule according to the second aspect the one or more enzymes that catalyse the conversion of acetyl-CoA to acryloyl-CoA include acetyl-CoA carboxylase (EC 6.4.1.2); malonyl CoA reductase (EC 1.2.1.75); malonyl CoA reductase (EC 1.1.1.298); propionyl-CoA synthase (EC 6.2.1.36); and propionyl-CoA synthase/acryloyl-CoA synthase (EC 4.2.1.116). In some embodiments the one or more enzymes that catalyse the conversion of acetyl-CoA to acryloyl-CoA include lactate CoA-transferase (EC 2.8.3.-); and lactoyl-CoA dehydratase (EC 4.2.1.54). In some embodiments the one or more enzymes that catalyse the conversion of acetyl-CoA to acryloyl-CoA include acyl-CoA thioesterase (EC 3.1.2.-) and (b) phenyl acrylic acid decarboxylase (EC 4.1.1.-).

[0116] In some embodiments of the recombinant nucleic acid molecule according to the second aspect the one or more enzymes that catalyse the conversion of acetyl-CoA to acryloyl-CoA include phosphate butyryltransferase (EC 2.3.1.19); butyrate kinase (EC 2.7.2.7), and phenyl acrylic acid decarboxylase (EC 4.1.1.-). In some embodiments the one or more enzymes that catalyse the conversion of acetyl-CoA to acryloyl-CoA include trans-2-enoyl-CoA reductase (EC1.1.1.36); acetyl-CoA C-acetyltransferase (EC 2.3.1.9); 3-hydroxybutyryl-CoA dehydrogenase (EC 1.1.1.157); 3-hydroxybutyryl-CoA dehydratase (EC 4.2.1.55); acyl-CoA thioesterase (EC 3.1.2.-) and/or a combination of phosphate butyryltransferase (EC 2.3.1.19) and butyrate kinase (EC 2.7.2.7); and a phenyl acrylic acid decarboxylase enzyme (EC 4.1.1.-).

[0117] In some embodiments of the recombinant nucleic acid molecule according to the second aspect the one or more enzymes that catalyse the conversion of acetyl-CoA to acryloyl-CoA include aldehyde dehydrogenase (EC 1.2.1.-) or alcohol dehydrogenase (EC 1.1.1.-); aldehyde dehydrogenase (EC 1.2.1.-) and/or alcohol dehydrogenase (EC 1.1.1.-); and geraniol isomerase (EC 5.4.4.4), which is also linalool dehydratase (EC 4.2.1.127). In some embodiments the one or more enzymes that catalyse the conversion of acetyl-CoA to acryloyl-CoA include aldehyde dehydrogenase (EC 1.2.1.-) or alcohol dehydrogenase (EC 1.1.1.-); aldehyde dehydrogenase (EC 1.2.1.-) and/or alcohol dehydrogenase (EC 1.1.1.-); and a combination of (i) one or more of farnesol kinase (EC 2.7.1.-), geranylgeraniol kinase (EC 2.7.1.B19), hydroxyethylthiazole kinase (EC 2.7.1.50) or undecaprenol kinase (EC 2.7.1.66), and (ii) one or more of 2-methyl-1,3-butadiene synthase (EC 4.2.3.27) or methylbutenol synthase.

[0118] In some embodiments of the recombinant nucleic acid molecule according to the second aspect the one or more enzymes that catalyse the conversion of acetyl-CoA to acryloyl-CoA include a combination of acyl-CoA thioesterase (EC 3.1.2.-) and aldehyde dehydrogenase (EC 1.2.1.-) or alcohol dehydrogenase (EC 1.1.1.-); aldehyde dehydrogenase (EC 1.2.1.-) and/or alcohol dehydrogenase (EC 1.1.1.-); and geraniol isomerase (EC 5.4.4.4), which is also linalool dehydratase (EC 4.2.1.127). In some embodiments the one or more enzymes that catalyse the conversion of acetyl-CoA to acryloyl-CoA include a combination of acyl-CoA thioesterase (EC 3.1.2.-) and aldehyde dehydrogenase (EC 1.2.1.-) or alcohol dehydrogenase (EC 1.1.1.-); aldehyde dehydrogenase (EC 1.2.1.-) and/or alcohol dehydrogenase (EC 1.1.1.-); and a combination of (i) one or more of farnesol kinase (EC 2.7.1.-), geranylgeraniol kinase (EC 2.7.1.B19), hydroxyethylthiazole kinase (EC 2.7.1.50) or undecaprenol kinase (EC 2.7.1.66), and (ii) one or more of 2-methyl-1,3-butadiene synthase (EC 4.2.3.27) or methylbutenol synthase.

[0119] In some embodiments of the recombinant nucleic acid molecule according to the second aspect the one or more enzymes that catalyse the conversion of acetyl-CoA to acryloyl-CoA include a combination of aldehyde ferredoxin oxidoreductase (EC 1.2.7.5) and acyl-CoA thioesterase (EC 3.1.2.-); aldehyde dehydrogenase (EC 1.2.1.-) and/or alcohol dehydrogenase (EC 1.1.1.-); and geraniol isomerase (EC 5.4.4.4), which is also linalool dehydratase (EC 4.2.1.127). In some embodiments the one or more enzymes that catalyse the conversion of acetyl-CoA to acryloyl-CoA include a combination of aldehyde ferredoxin oxidoreductase (EC 1.2.7.5) and acyl-CoA thioesterase (EC 3.1.2.-); aldehyde dehydrogenase (EC 1.2.1.-) and/or alcohol dehydrogenase (EC 1.1.1.-); and a combination of (i) one or more of farnesol kinase (EC 2.7.1.-), geranylgeraniol kinase (EC 2.7.1.B19), hydroxyethylthiazole kinase (EC 2.7.1.50) or undecaprenol kinase (EC 2.7.1.66), and (ii) one or more of 2-methyl-1,3-butadiene synthase (EC 4.2.3.27) or methylbutenol synthase.

[0120] In some embodiments of the recombinant nucleic acid molecule according to the second aspect the one or more enzymes that catalyse the conversion of acetyl-CoA to acryloyl-CoA include a combination of aldehyde ferredoxin oxidoreductase (EC 1.2.7.5) and acyl-CoA thioesterase (EC 3.1.2.-); aldehyde dehydrogenase (EC 1.2.1.-) and/or alcohol dehydrogenase (EC 1.1.1.-); and geraniol isomerase (EC 5.4.4.4), which is also linalool dehydratase (EC 4.2.1.127). In some embodiments the one or more enzymes that catalyse the conversion of acetyl-CoA to acryloyl-CoA include a combination of aldehyde ferredoxin oxidoreductase (EC 1.2.7.5) and acyl-CoA thioesterase (EC 3.1.2.-); aldehyde dehydrogenase (EC 1.2.1.-) and/or alcohol dehydrogenase (EC 1.1.1.-); and a combination of (i) one or more of farnesol kinase (EC 2.7.1.-), geranylgeraniol kinase (EC 2.7.1.B19), hydroxyethylthiazole kinase (EC 2.7.1.50) or undecaprenol kinase (EC 2.7.1.66), and (ii) one or more of 2-methyl-1,3-butadiene synthase (EC 4.2.3.27) or methylbutenol synthase.

[0121] In some embodiments of the recombinant nucleic acid molecule according to the second aspect the one or more enzymes that catalyse the conversion of acetyl-CoA to acryloyl-CoA include a combination of phosphate butyryltransferase (EC 2.3.1.19), butyrate kinase (EC 2.7.2.7) and aldehyde dehydrogenase (EC 1.2.1.-) or alcohol dehydrogenase (EC 1.1.1.-); aldehyde dehydrogenase (EC 1.2.1.-) and/or alcohol dehydrogenase (EC 1.1.1.-); and geraniol isomerase (EC 5.4.4.4), which is also linalool dehydratase (EC 4.2.1.127). In some embodiments the one or more enzymes that catalyse the conversion of acetyl-CoA to acryloyl-CoA include a combination of phosphate butyryltransferase (EC 2.3.1.19), butyrate kinase (EC 2.7.2.7) and aldehyde dehydrogenase (EC 1.2.1.-) or alcohol dehydrogenase (EC 1.1.1.-); aldehyde dehydrogenase (EC 1.2.1.-) and/or alcohol dehydrogenase (EC 1.1.1.-); and a combination of (i) one or more of farnesol kinase (EC 2.7.1.-), geranylgeraniol kinase (EC 2.7.1.B19), hydroxyethylthiazole kinase (EC 2.7.1.50) or undecaprenol kinase (EC 2.7.1.66), and (ii) one or more of 2-methyl-1,3-butadiene synthase (EC 4.2.3.27) or methylbutenol synthase.

[0122] In some embodiments of the recombinant nucleic acid molecule according to the second aspect the one or more enzymes that catalyse the conversion of acetyl-CoA to acryloyl-CoA include a combination of phosphate butyryltransferase (EC 2.3.1.19), butyrate kinase (EC 2.7.2.7) and aldehyde ferredoxin oxidoreductase (EC 1.2.7.5); (m) aldehyde dehydrogenase (EC 1.2.1.-) and/or alcohol dehydrogenase (EC 1.1.1.-); and geraniol isomerase (EC 5.4.4.4), which is also linalool dehydratase (EC 4.2.1.127). In some embodiments the one or more enzymes that catalyse the conversion of acetyl-CoA to acryloyl-CoA include a combination of phosphate butyryltransferase (EC 2.3.1.19), butyrate kinase (EC 2.7.2.7) and aldehyde ferredoxin oxidoreductase (EC 1.2.7.5); (m) aldehyde dehydrogenase (EC 1.2.1.-) and/or alcohol dehydrogenase (EC 1.1.1.-); and a combination of (i) one or more of farnesol kinase (EC 2.7.1.-), geranylgeraniol kinase (EC 2.7.1.B19), hydroxyethylthiazole kinase (EC 2.7.1.50) or undecaprenol kinase (EC 2.7.1.66), and (ii) one or more of 2-methyl-1,3-butadiene synthase (EC 4.2.3.27) or methylbutenol synthase.

[0123] In some embodiments of the recombinant nucleic acid molecule according to the second aspect the one or more enzymes that catalyse the conversion of 3-methylcrotonyl-CoA to an alkene include the enzyme phenyl acrylic acid decarboxylase (EC 4.1.1.-); and the enzyme acyl-CoA thioesterase (EC 3.1.2.-) and/or a combination of phosphate butyryltransferase (EC 2.3.1.19) and butyrate kinase (EC 2.7.2.7).

[0124] In some embodiments of the recombinant nucleic acid molecule according to the second aspect the one or more enzymes that catalyse the conversion of 3-methylcrotonyl-CoA to an alkene include a combination of acyl-CoA thioesterase (EC 3.1.2.-) and aldehyde dehydrogenase (EC 1.2.1.-) or alcohol dehydrogenase (EC 1.1.1.-); aldehyde dehydrogenase (EC 1.2.1.-) and/or alcohol dehydrogenase (EC 1.1.1.-); and geraniol isomerase (EC 5.4.4.4), which is also linalool dehydratase (EC 4.2.1.127). In some embodiments the one or more enzymes that catalyse the conversion of 3-methylcrotonyl-CoA to an alkene include a combination of acyl-CoA thioesterase (EC 3.1.2.-) and aldehyde dehydrogenase (EC 1.2.1.-) or alcohol dehydrogenase (EC 1.1.1.-); aldehyde dehydrogenase (EC 1.2.1.-) and/or alcohol dehydrogenase (EC 1.1.1.-); and a combination of (i) one or more of farnesol kinase (EC 2.7.1.-), geranylgeraniol kinase (EC 2.7.1.B19), hydroxyethylthiazole kinase (EC 2.7.1.50) or undecaprenol kinase (EC 2.7.1.66), and (ii) one or more of 2-methyl-1,3-butadiene synthase (EC 4.2.3.27) or methylbutenol synthase.

[0125] In some embodiments of the recombinant nucleic acid molecule according to the second aspect the one or more enzymes that catalyse the conversion of 3-methylcrotonyl-CoA to an alkene include aldehyde dehydrogenase (EC 1.2.1.-) or alcohol dehydrogenase (EC 1.1.1.-); aldehyde dehydrogenase (EC 1.2.1.-) and/or alcohol dehydrogenase (EC 1.1.1.-); and geraniol isomerase (EC 5.4.4.4), which is also linalool dehydratase (EC 4.2.1.127). In some embodiments the one or more enzymes that catalyse the conversion of 3-methylcrotonyl-CoA to an alkene include aldehyde dehydrogenase (EC 1.2.1.-) or alcohol dehydrogenase (EC 1.1.1.-); and a combination of (i) one or more of farnesol kinase (EC 2.7.1.-), geranylgeraniol kinase (EC 2.7.1.B19), hydroxyethylthiazole kinase (EC 2.7.1.50) or undecaprenol kinase (EC 2.7.1.66), and (ii) one or more of 2-methyl-1,3-butadiene synthase (EC 4.2.3.27) or methylbutenol synthase.

[0126] In some embodiments of the recombinant nucleic acid molecule according to the second aspect the one or more enzymes that catalyse the conversion of 3-methylcrotonyl-CoA to an alkene include a combination of aldehyde ferredoxin oxidoreductase (EC 1.2.7.5) and acyl-CoA thioesterase (EC 3.1.2.-); aldehyde dehydrogenase (EC 1.2.1.-) and/or alcohol dehydrogenase (EC 1.1.1.-); and geraniol isomerase (EC 5.4.4.4), which is also linalool dehydratase (EC 4.2.1.127). In some embodiments of the recombinant nucleic acid molecule according to the second aspect the one or more enzymes that catalyse the conversion of 3-methylcrotonyl-CoA to an alkene include a combination of aldehyde ferredoxin oxidoreductase (EC 1.2.7.5) and acyl-CoA thioesterase (EC 3.1.2.-); aldehyde dehydrogenase (EC 1.2.1.-) and/or alcohol dehydrogenase (EC 1.1.1.-); and a combination of (i) one or more of farnesol kinase (EC 2.7.1.-), geranylgeraniol kinase (EC 2.7.1.B19), hydroxyethylthiazole kinase (EC 2.7.1.50) or undecaprenol kinase (EC 2.7.1.66), and (ii) one or more of 2-methyl-1,3-butadiene synthase (EC 4.2.3.27) or methylbutenol synthase.

[0127] In some embodiments of the recombinant nucleic acid molecule according to the second aspect the one or more enzymes that catalyse the conversion of 3-methylcrotonyl-CoA to an alkene include a combination of phosphate butyryltransferase (EC 2.3.1.19), butyrate kinase (EC 2.7.2.7) and aldehyde dehydrogenase (EC 1.2.1.-) or alcohol dehydrogenase (EC 1.1.1.-); aldehyde dehydrogenase (EC 1.2.1.-) and/or alcohol dehydrogenase (EC 1.1.1.-); and geraniol isomerase (EC 5.4.4.4), which is also linalool dehydratase (EC 4.2.1.127). In some embodiments the one or more enzymes that catalyse the conversion of 3-methylcrotonyl-CoA to an alkene include a combination of phosphate butyryltransferase (EC 2.3.1.19), butyrate kinase (EC 2.7.2.7) and aldehyde dehydrogenase (EC 1.2.1.-) or alcohol dehydrogenase (EC 1.1.1.-); aldehyde dehydrogenase (EC 1.2.1.-) and/or alcohol dehydrogenase (EC 1.1.1.-); and a combination of (i) one or more of farnesol kinase (EC 2.7.1.-), geranylgeraniol kinase (EC 2.7.1.B19), hydroxyethylthiazole kinase (EC 2.7.1.50) or undecaprenol kinase (EC 2.7.1.66), and (ii) one or more of 2-methyl-1,3-butadiene synthase (EC 4.2.3.27) or methylbutenol synthase.

[0128] In some embodiments of the recombinant nucleic acid molecule according to the second aspect the one or more enzymes that catalyse the conversion of 3-methylcrotonyl-CoA to an alkene include a combination of phosphate butyryltransferase (EC 2.3.1.19), butyrate kinase (EC 2.7.2.7) and aldehyde ferredoxin oxidoreductase (EC 1.2.7.5); aldehyde dehydrogenase (EC 1.2.1.-) and/or alcohol dehydrogenase (EC 1.1.1.-); and geraniol isomerase (EC 5.4.4.4), which is also linalool dehydratase (EC 4.2.1.127). In some embodiments the one or more enzymes that catalyse the conversion of 3-methylcrotonyl-CoA to an alkene include a combination of phosphate butyryltransferase (EC 2.3.1.19), butyrate kinase (EC 2.7.2.7) and aldehyde ferredoxin oxidoreductase (EC 1.2.7.5); aldehyde dehydrogenase (EC 1.2.1.-) and/or alcohol dehydrogenase (EC 1.1.1.-); and a combination of (i) one or more of farnesol kinase (EC 2.7.1.-), geranylgeraniol kinase (EC 2.7.1.B19), hydroxyethylthiazole kinase (EC 2.7.1.50) or undecaprenol kinase (EC 2.7.1.66), and (ii) one or more of 2-methyl-1,3-butadiene synthase (EC 4.2.3.27) or methylbutenol synthase.

[0129] In some embodiments of the recombinant nucleic acid molecule according to the second aspect the one or more enzymes that catalyse the conversion of propionyl-CoA to an alkene include acetyl-CoA C-acetyltransferase (EC 2.3.1.9); a combination of acetoacetyl-CoA reductase (EC 1.1.1.36) and enoyl-CoA hydratase 2 (EC 4.2.1.119); acyl-CoA thioesterase (EC 3.1.2.-) and/or a combination of phosphate butyryltransferase (EC 2.3.1.19) and butyrate kinase (EC 2.7.2.7); and phenyl acrylic acid decarboxylase (EC 4.1.1.-). In some embodiments the one or more enzymes that catalyse the conversion of propionyl-CoA to an alkene include acetyl-CoA C-acetyltransferase (EC 2.3.1.9); a combination of 3-hydroxybutyryl-CoA dehydrogenase (EC 1.1.1.157) and 3-hydroxy-butyryl-CoA dehydratase (EC 4.2.1.55); acyl-CoA thioesterase (EC 3.1.2.-) and/or a combination of phosphate butyryltransferase (EC 2.3.1.19) and butyrate kinase (EC 2.7.2.7); and phenyl acrylic acid decarboxylase (EC 4.1.1.-).

[0130] In some embodiments of the recombinant nucleic acid molecule according to the second aspect the one or more enzymes that catalyse the conversion of acryloyl-CoA to an alkene include acyl-CoA thioesterase (EC 3.1.2.-); and phenyl acrylic acid decarboxylase (EC 4.1.1.-). In some embodiments the one or more enzymes that catalyse the conversion of acryloyl-CoA to an alkene include phosphate butyryltransferase (EC 2.3.1.19); butyrate kinase (EC 2.7.2.7); and phenyl acrylic acid decarboxylase (EC 4.1.1.-).

[0131] In some embodiments the recombinant nucleic acid molecule according to the second aspect includes coding sequences encoding the enzyme acetyl-CoA C-acetyltransferase (EC 2.3.1.9); the enzyme 3-hydroxybutyryl-CoA dehydrogenase (EC 1.1.1.157); the enzyme 3-hydroxybutyryl-CoA dehydratase (EC 4.2.1.55); an acyl-CoA thioesterase enzyme (EC 3.1.2.-); an aldehyde dehydrogenase (EC 1.2.1.-) or an alcohol dehydrogenase enzyme (EC 1.1.1.-); and the enzyme geraniol isomerase (EC 5.4.4.4), which is also linalool dehydratase (EC 4.2.1.127). In some embodiments the recombinant nucleic acid molecule includes coding sequences encoding the enzyme Acetyl-CoA carboxylase (EC 6.4.1.2); the enzyme acetoacetyl-CoA synthase (EC 2.3.1.194); the enzyme acetoacetyl-CoA reductase (EC 1.1.1.36); the enzyme enoyl-CoA hydratase 2 (EC 4.2.1.119); an acyl-CoA thioesterase enzyme (EC 3.1.2.-); an aldehyde dehydrogenase (EC 1.2.1.-) or an alcohol dehydrogenase enzyme (EC 1.1.1.-); and the enzyme geraniol isomerase (EC 5.4.4.4), which is also linalool dehydratase (EC 4.2.1.127).

[0132] In some embodiments the recombinant nucleic acid molecule according to the second aspect includes coding sequences encoding the enzyme 4-aminobutyrate aminotransferase (EC 2.6.1.19); the enzyme glutamate dehydrogenase (EC 1.4.1.2); the enzyme 2-hydroxyglutarate dehydrogenase (EC 1.1.99.2); the enzyme glutaconate CoA-transferase (EC 2.8.3.12); a 2-hydroxyglutaryl-CoA dehydratase enzyme (EC 4.2.1.-); the enzyme glutaconyl-CoA decarboxylase (EC 4.1.1.70); an acyl-CoA thioesterase enzyme (EC 3.1.2.-); an aldehyde dehydrogenase (EC 1.2.1.-) or an alcohol dehydrogenase enzyme (EC 1.1.1.-); and the enzyme geraniol isomerase (EC 5.4.4.4), which is also linalool dehydratase (EC 4.2.1.127).

[0133] In some embodiments the recombinant nucleic acid molecule according to the second aspect includes coding sequences encoding the enzyme 4-aminobutyrate aminotransferase (EC 2.6.1.19); the enzyme 4-hydroxybutyrate dehydrogenase (EC 1.1.1.61); a 4-hydroxybutyrate CoA-transferase enzyme (EC 2.8.3.-); the enzyme vinylacetyl-CoA-Delta-isomerase (EC 4.2.1.120); the enzyme 4-hydroxybutyryl-CoA dehydratase (EC 5.3.3.3); an acyl-CoA thioesterase enzyme (EC 3.1.2.-); an aldehyde dehydrogenase (EC 1.2.1.-) or an alcohol dehydrogenase enzyme (EC 1.1.1.-); and the enzyme geraniol isomerase (EC 5.4.4.4), which is also linalool dehydratase (EC 4.2.1.127).

[0134] In some embodiments the recombinant nucleic acid molecule according to the second aspect includes coding sequences encoding the enzyme acetyl-CoA C-acetyltransferase (EC 2.3.1.9) and/or the enzymes acetyl-CoA carboxylase (EC 6.4.1.2) and acetoacetyl-CoA synthase (EC 2.3.1.194), the enzyme 3-hydroxy-3-methylglutaryl-CoA synthase (EC 2.3.3.10), the enzyme 3-methylglutaconyl-CoA hydratase (EC 4.2.1.18), and the enzyme 3-methylcrotonyl-CoA carboxylase (EC 6.4.1.4); an aldehyde dehydrogenase (EC 1.2.1.-) or an alcohol dehydrogenase enzyme (EC 1.1.1.-); and the enzyme geraniol isomerase (EC 5.4.4.4), which is also linalool dehydratase (EC 4.2.1.127), and/or a combination of (i) one or more of the enzymes farnesol kinase (EC 2.7.1.-), geranylgeraniol kinase (EC 2.7.1.B19), hydroxyethylthiazole kinase (EC 2.7.1.50) or undecaprenol kinase (EC 2.7.1.66), and (ii) one or more of the enzymes 2-methyl-1,3-butadiene synthase (EC 4.2.3.27) or methylbutenol synthase.

[0135] In some embodiments the recombinant nucleic acid molecule according to the second aspect includes coding sequences encoding a combination of the enzymes acetyl-CoA C-acetyltransferase (EC 2.3.1.9), 3-hydroxybutyryl-CoA dehydrogenase (EC 1.1.1.157), and 3-hydroxybutyryl-CoA dehydratase (EC 4.2.1.55); and an aldehyde dehydrogenase (EC 1.2.1.-) or an alcohol dehydrogenase enzyme (EC 1.1.1.-); and the enzyme geraniol isomerase (EC 5.4.4.4), which is also linalool dehydratase (EC 4.2.1.127), and/or a combination of (i) one or more of the enzymes farnesol kinase (EC 2.7.1.-), geranylgeraniol kinase (EC 2.7.1.B19), hydroxyethylthiazole kinase (EC 2.7.1.50) or undecaprenol kinase (EC 2.7.1.66), and (ii) one or more of the enzymes 2-methyl-1,3-butadiene synthase (EC 4.2.3.27) or methylbutenol synthase.

[0136] In some embodiments the recombinant nucleic acid molecule according to the second aspect includes coding sequences encoding a combination of the enzymes Acetyl-CoA carboxylase (EC 6.4.1.2), acetoacetyl-CoA synthase (EC 2.3.1.194), acetoacetyl-CoA reductase (EC 1.1.1.36) and enoyl-CoA hydratase 2 (EC 4.2.1.119); and an aldehyde dehydrogenase (EC 1.2.1.-) or an alcohol dehydrogenase enzyme (EC 1.1.1.-); and the enzyme geraniol isomerase (EC 5.4.4.4), which is also linalool dehydratase (EC 4.2.1.127), and/or a combination of (i) one or more of the enzymes farnesol kinase (EC 2.7.1.-), geranylgeraniol kinase (EC 2.7.1.B19), hydroxyethylthiazole kinase (EC 2.7.1.50) or undecaprenol kinase (EC 2.7.1.66), and (ii) one or more of the enzymes 2-methyl-1,3-butadiene synthase (EC 4.2.3.27) or methylbutenol synthase.

[0137] In some embodiments the recombinant nucleic acid molecule according to the second aspect includes coding sequences encoding (i) a combination of the enzymes acetyl-CoA C-acetyltransferase (EC 2.3.1.9), 3-hydroxybutyryl-CoA dehydrogenase (EC 1.1.1.157), and 3-hydroxybutyryl-CoA dehydratase (EC 4.2.1.55), and/or a combination of the enzymes the enzymes Acetyl-CoA carboxylase (EC 6.4.1.2), acetoacetyl-CoA synthase (EC 2.3.1.194), acetoacetyl-CoA reductase (EC 1.1.1.36) and enoyl-CoA hydratase 2 (EC 4.2.1.119); (ii) a combination of the enzymes phosphate butyryltransferase (EC 2.3.1.19) and butyrate kinase (EC 2.7.2.7), and/or an acyl-CoA thioesterase enzyme (EC 3.1.2.-); and (iii) a phenyl acrylic acid decarboxylase enzyme (EC 4.1.1.-).

[0138] In some embodiments the recombinant nucleic acid molecule according to the second aspect includes coding sequences encoding (i) a combination of the enzyme acetyl-CoA C-acetyltransferase (EC 2.3.1.9) and/or the enzymes Acetyl-CoA carboxylase (EC 6.4.1.2) and acetoacetyl-CoA synthase (EC 2.3.1.194); the enzyme 3-hydroxy-3-methylglutaryl-CoA synthase (EC 2.3.3.10); the enzyme 3-methylglutaconyl-CoA hydratase (EC 4.2.1.18); and the enzyme 3-methylglutaconyl-CoA decarboxylase; (ii) a combination of the enzymes phosphate butyryltransferase (EC 2.3.1.19) and butyrate kinase (EC 2.7.2.7), and/or an acyl-CoA thioesterase enzyme (EC 3.1.2.-); and (iii) a phenyl acrylic acid decarboxylase enzyme (EC 4.1.1.-).

[0139] In some embodiments the recombinant nucleic acid molecule according to the second aspect includes coding sequences encoding the enzyme lactate CoA-transferase (EC 2.8.3.-); the enzyme lactoyl-CoA dehydratase (EC 4.2.1.54); and the enzyme acyl-CoA thioesterase (EC 3.1.2.-). In some embodiments the recombinant nucleic acid molecule includes coding sequences encoding the enzyme lactate CoA-transferase (EC 2.8.3.-), the enzyme lactoyl-CoA dehydratase (EC 4.2.1.54); the enzyme phosphate butyryltransferase (EC 2.3.1.19); the enzyme butyrate kinase (EC 2.7.2.7); and the enzyme phenyl acrylic acid decarboxylase (EC 4.1.1.-).

[0140] In some embodiments the recombinant nucleic acid molecule according to the second aspect includes coding sequences encoding the enzyme 4-aminobutyrate aminotransferase (EC 2.6.1.19); the enzyme 4-hydroxybutyrate dehydrogenase (EC 1.1.1.61); a 4-hydroxybutyrate CoA-transferase enzyme (EC 2.8.3.-); the enzyme vinylacetyl-CoA-delta-isomerase (EC 4.2.1.120); the enzyme 4-hydroxybutyryl-CoA dehydratase (EC 5.3.3.3); a combination of the enzymes phosphate butyryltransferase (EC 2.3.1.19) and butyrate kinase (EC 2.7.2.7), and/or an acyl-CoA thioesterase enzyme (EC 3.1.2.-); and the enzyme phenyl acrylic acid decarboxylase (EC 4.1.1.-). In some embodiments the recombinant nucleic acid molecule includes coding sequences encoding the enzyme 4-aminobutyrate aminotransferase (EC 2.6.1.19); the enzyme glutamate dehydrogenase (EC 1.4.1.2); the enzyme 2-hydroxyglutarate dehydrogenase (EC 1.1.99.2); the enzyme glutaconate CoA-transferase (EC 2.8.3.12); the enzyme 2-hydroxyglutaryl-CoA dehydratase (EC 4.2.1.-); the enzyme glutaconyl-CoA decarboxylase (EC 4.1.1.70); a combination of the enzymes phosphate butyryltransferase (EC 2.3.1.19) and butyrate kinase (EC 2.7.2.7), and/or an acyl-CoA thioesterase enzyme (EC 3.1.2.-); and the enzyme phenyl acrylic acid decarboxylase (EC 4.1.1.-).

[0141] In some embodiments the recombinant nucleic acid molecule according to the second aspect includes coding sequences encoding the enzyme 3-hydroxybutyryl-CoA dehydrogenase (EC 1.1.1.157); 3-hydroxybutyryl-CoA dehydratase (EC 4.2.1.55); the enzyme trans-2-enoyl-CoA reductase (EC1.1.1.36); the enzyme acetyl-CoA C-acetyltransferase (EC 2.3.1.9); the enzyme 3-hydroxybutyryl-CoA dehydrogenase (EC 1.1.1.157); the enzyme 3-hydroxybutyryl-CoA dehydratase (EC 4.2.1.55); a combination of the enzymes phosphate butyryltransferase (EC 2.3.1.19) and butyrate kinase (EC 2.7.2.7), and/or an acyl-CoA thioesterase enzyme (EC 3.1.2.-); and a phenyl acrylic acid decarboxylase enzyme (EC 4.1.1.-).

[0142] In some embodiments the recombinant nucleic acid molecule according to the second aspect includes coding sequences encoding the enzyme Acetyl-CoA carboxylase (EC 6.4.1.2); acetoacetyl-CoA synthase (EC 2.3.1.194); acetoacetyl-CoA reductase (EC 1.1.1.36); enoyl-CoA hydratase 2 (EC 4.2.1.119); the enzyme trans-2-enoyl-CoA reductase (EC1.1.1.36); the enzyme acetyl-CoA C-acetyltransferase (EC 2.3.1.9); the enzyme 3-hydroxybutyryl-CoA dehydrogenase (EC 1.1.1.157); the enzyme 3-hydroxybutyryl-CoA dehydratase (EC 4.2.1.55); a combination of the enzymes phosphate butyryltransferase (EC 2.3.1.19) and butyrate kinase (EC 2.7.2.7), and/or an acyl-CoA thioesterase enzyme (EC 3.1.2.-); and a phenyl acrylic acid decarboxylase enzyme (EC 4.1.1.-).

[0143] In some embodiments the recombinant nucleic acid molecule according to the second aspect includes coding sequences encoding the enzyme acetyl-CoA carboxylase (EC 6.4.1.2); the enzyme methylmalonyl-CoA mutase (EC 5.4.99.2); the enzyme methylmalonyl-CoA decarboxylase (EC 4.1.1.41); the enzyme acetyl-CoA C-acetyltransferase (EC 2.3.1.9); a combination of (i) the enzymes acetoacetyl-CoA reductase (EC 1.1.1.36) and enoyl-CoA hydratase 2 (EC 4.2.1.119) and/or (ii) the enzymes 3-hydroxybutyryl-CoA dehydrogenase (EC 1.1.1.157) and 3-hydroxybutyryl-CoA dehydratase (EC 4.2.1.55); (vi) an acyl-CoA thioesterase enzyme (EC 3.1.2.-); the enzyme acetyl-CoA C-acetyltransferase (EC 2.3.1.9); the enzyme acetoacetyl-CoA reductase (EC 1.1.1.36); the enzyme enoyl-CoA hydratase 2 (EC 4.2.1.119); a combination of the enzymes phosphate butyryltransferase (EC 2.3.1.19) and butyrate kinase (EC 2.7.2.7), and/or an acyl-CoA thioesterase enzyme (EC 3.1.2.-); and a phenyl acrylic acid decarboxylase enzyme (EC 4.1.1.-).

[0144] In some embodiments the recombinant nucleic acid molecule according to the second aspect includes coding sequences encoding the enzyme acetyl-CoA carboxylase (EC 6.4.1.2); the enzyme methylmalonyl-CoA mutase (EC 5.4.99.2); the enzyme methylmalonyl-CoA decarboxylase (EC 4.1.1.41); the enzyme acetyl-CoA C-acetyltransferase (EC 2.3.1.9); a combination of (i) the enzymes acetoacetyl-CoA reductase (EC 1.1.1.36) and enoyl-CoA hydratase 2 (EC 4.2.1.119) and/or (ii) the enzymes 3-hydroxybutyryl-CoA dehydrogenase (EC 1.1.1.157) and 3-hydroxybutyryl-CoA dehydratase (EC 4.2.1.55); an acyl-CoA thioesterase enzyme (EC 3.1.2.-); the enzyme acetyl-CoA C-acetyltransferase (EC 2.3.1.9); the enzyme 3-hydroxybutyryl-CoA dehydrogenase (EC 1.1.1.157); the enzyme 3-hydroxybutyryl-CoA dehydratase (EC 4.2.1.55); a combination of the enzymes phosphate butyryltransferase (EC 2.3.1.19) and butyrate kinase (EC 2.7.2.7), and/or an acyl-CoA thioesterase enzyme (EC 3.1.2.-); and a phenyl acrylic acid decarboxylase enzyme (EC 4.1.1.-).

[0145] In some embodiments the recombinant nucleic acid molecule according to the second aspect includes coding sequences encoding the enzyme 2-oxoglutarate/butyrate ferredoxin oxidoreductase (EC 1.2.7.3); the enzyme pyruvate/2-oxobutyrate ferredoxin oxidoreductase (EC 1.2.7.1); the enzyme lactoyl-CoA dehydratase (EC 4.2.1.54); the enzyme acetyl-CoA C-acetyltransferase (EC 2.3.1.9); a combination of (i) the enzymes acetoacetyl-CoA reductase (EC 1.1.1.36) and enoyl-CoA hydratase 2 (EC 4.2.1.119) and/or (ii) the enzymes 3-hydroxybutyryl-CoA dehydrogenase (EC 1.1.1.157) and 3-hydroxybutyryl-CoA dehydratase (EC 4.2.1.55); a combination of the enzymes phosphate butyryltransferase (EC 2.3.1.19) and butyrate kinase (EC 2.7.2.7), and/or an acyl-CoA thioesterase enzyme (EC 3.1.2.-); and a phenyl acrylic acid decarboxylase enzyme (EC 4.1.1.-).

[0146] In some embodiments the recombinant nucleic acid molecule according to the second aspect includes coding sequences encoding the enzyme lactate CoA-transferase enzyme (EC 2.8.3.-); the enzyme lactoyl-CoA dehydratase (EC 4.2.1.54); the enzyme propionyl-CoA synthase (EC 1.3.1.84); the enzyme lactoyl-CoA dehydratase (EC 4.2.1.54); the enzyme acetyl-CoA C-acetyltransferase (EC 2.3.1.9); a combination of (i) the enzymes acetoacetyl-CoA reductase (EC 1.1.1.36) and enoyl-CoA hydratase 2 (EC 4.2.1.119) and/or (ii) the enzymes 3-hydroxybutyryl-CoA dehydrogenase (EC 1.1.1.157) and 3-hydroxybutyryl-CoA dehydratase (EC 4.2.1.55); a combination of the enzymes phosphate butyryltransferase (EC 2.3.1.19) and butyrate kinase (EC 2.7.2.7), and/or an acyl-CoA thioesterase enzyme (EC 3.1.2.-); and a phenyl acrylic acid decarboxylase enzyme (EC 4.1.1.-).

[0147] In some embodiments the recombinant nucleic acid molecule according to the second aspect includes coding sequences encoding the enzyme acetyl-CoA carboxylase (EC 6.4.1.2); the enzyme malonyl CoA reductase (EC 1.2.1.75); the enzyme malonyl CoA reductase (EC 1.1.1.298); the enzyme propionyl-CoA synthase (EC 6.2.1.36); the enzyme propionyl-CoA synthase/acryloyl-CoA synthase (EC 4.2.1.116); the enzyme propionyl-CoA synthase (EC 1.3.1.84); the enzyme lactoyl-CoA dehydratase (EC 4.2.1.54); the enzyme acetyl-CoA C-acetyltransferase (EC 2.3.1.9); a combination of (i) the enzymes acetoacetyl-CoA reductase (EC 1.1.1.36) and enoyl-CoA hydratase 2 (EC 4.2.1.119) and/or (ii) the enzymes 3-hydroxybutyryl-CoA dehydrogenase (EC 1.1.1.157) and 3-hydroxybutyryl-CoA dehydratase (EC 4.2.1.55); a combination of the enzymes phosphate butyryltransferase (EC 2.3.1.19) and butyrate kinase (EC 2.7.2.7), and/or an acyl-CoA thioesterase enzyme (EC 3.1.2.-); and a phenyl acrylic acid decarboxylase enzyme (EC 4.1.1.-).

[0148] In some embodiments the recombinant nucleic acid molecule according to the second aspect includes coding sequences encoding the enzyme 4-aminobutyrate aminotransferase (EC 2.6.1.19); a combination of (i) the enzyme glutamate dehydrogenase (EC 1.4.1.2), the enzyme 2-hydroxyglutarate dehydrogenase (EC 1.1.99.2), the enzyme glutaconate CoA-transferase (EC 2.8.3.12), a 2-hydroxyglutaryl-CoA dehydratase enzyme (EC 4.2.1.-) and/or (ii) the enzyme 4-hydroxybutyrate dehydrogenase (EC 1.1.1.61), a 4-hydroxybutyrate CoA-transferase enzyme (EC 2.8.3.-), the enzyme vinylacetyl-CoA-delta-isomerase (EC 4.2.1.120) and the enzyme glutaconyl-CoA decarboxylase (EC 4.1.1.70); the enzyme 4-hydroxybutyryl-CoA dehydratase (EC 5.3.3.3); the enzyme trans-2-enoyl-CoA reductase (EC1.1.1.36); the enzyme acetyl-CoA C-acetyltransferase (EC 2.3.1.9); the enzyme 3-hydroxybutyryl-CoA dehydrogenase (EC 1.1.1.157); the enzyme 3-hydroxybutyryl-CoA dehydratase (EC 4.2.1.55); an acyl-CoA thioesterase enzyme (EC 3.1.2.-); and a phenyl acrylic acid decarboxylase enzyme (EC 4.1.1.-).

[0149] In some embodiments the recombinant nucleic acid molecule according to the second aspect includes coding sequences encoding the enzyme acetyl-CoA carboxylase (EC 6.4.1.2); the enzyme malonyl CoA reductase (malonate semialdehyde-forming) (EC 1.2.1.75); the enzyme 3-hydroxypropionate dehydrogenase (EC 1.1.1.298); the enzyme 3-hydroxypropionyl-CoA synthase (EC 6.2.1.36); the enzyme hydroxypropionyl-CoA dehydratase (EC 4.2.1.116); a combination of the enzymes phosphate butyryltransferase (EC 2.3.1.19) and butyrate kinase (EC 2.7.2.7), and/or an acyl-CoA thioesterase enzyme (EC 3.1.2.-); and a phenyl acrylic acid decarboxylase enzyme (EC 4.1.1.-). In some embodiments the recombinant nucleic acid molecule includes coding sequences encoding a combination of (i) the enzyme acetyl-CoA carboxylase (EC 6.4.1.2), a lactate CoA-transferase enzyme (EC 2.8.3.-), and the enzyme lactoyl-CoA dehydratase (EC 4.2.1.54) and/or (ii) a lactate CoA-transferase enzyme (EC 2.8.3.-) and the enzyme lactoyl-CoA dehydratase (EC 4.2.1.54); a combination of the enzymes phosphate butyryltransferase (EC 2.3.1.19) and butyrate kinase (EC 2.7.2.7), and/or an acyl-CoA thioesterase enzyme (EC 3.1.2.-); and a phenyl acrylic acid decarboxylase enzyme (EC 4.1.1.-).

[0150] According to a third aspect, there is provided a method of producing one or more alkenes with a main chain of 2 to 5 carbon atoms. The method includes contacting a recombinant microorganism according to the second aspect with carbon monoxide and/or carbon dioxide.

[0151] The method according to the third aspect may be a method of producing ethylene. The method may also be a method of producing 1-propene. In some embodiments the method may be a method of producing 1-butene. The method may in some embodiments be a method of producing 2-methylpropene. In some embodiments the method may be a method of producing 1,3-butadiene. In some embodiments the method may be a method of producing 1-pentene. The method may in some embodiments be a method of producing 2-methyl-1,3-butadiene.

[0152] Additional advantages will be set forth in part in the description that follows, and in part will be apparent from the description and drawings, or can be learned by practice of a method or microorganism disclosed herein. The advantages of a respective method and microorganism will be realized and attained by means of the elements and combinations particularly pointed out in the appended claims. It is to be understood that both the foregoing general description and the following detailed description are exemplary and explanatory only and are not restrictive of the invention, as claimed.

### BRIEF DESCRIPTION OF THE DRAWINGS

[0153] FIG. 1A depicts four nitrogenase pathways for the generation of hydrocarbons from CO, CO₂ and/or CN, and electrons.

[0154] FIG. 1B depicts the pathways, including the key enzymes, for the formation of ethene from carbon monoxide and/or from carbon dioxide as well as from carbon dioxide and electrons and/or from carbon monoxide and electrons.

[0155] FIG. 1C depicts the pathways, including the key enzymes, for the formation of propene from carbon monoxide and/or from carbon dioxide as well as from carbon dioxide and electrons and/or from carbon monoxide and electrons.

[0156] FIG. 1D shows the pathways, including the key enzymes, for the formation of 1-butene from carbon monoxide and/or from carbon dioxide as well as from carbon dioxide and electrons and/or from carbon monoxide and electrons.

[0157] FIG. 1E depicts the pathways, including the key enzymes, for the formation of isobutene from carbon monoxide and/or from carbon dioxide as well as from carbon dioxide and electrons and/or from carbon monoxide and electrons.

[0158] FIG. 1F depicts the pathways, including the key enzymes, for the formation of 1,3-butadiene from carbon monoxide and/or from carbon dioxide as well as from carbon dioxide and electrons and/or from carbon monoxide and electrons.

[0159] FIG. 1G depicts the pathways, including the key enzymes, for the formation of 2-methyl-1,3-butadiene from carbon monoxide and/or from carbon dioxide as well as from carbon dioxide and electrons and/or from carbon monoxide and electrons. (DMAP=dimethylallyl monophosphate)

[0160] FIG. 1H depicts the pathways, including the key enzymes, for the formation of 1-pentene from carbon monoxide and/or from carbon dioxide as well as from carbon dioxide and electrons and/or from carbon monoxide and electrons.

[0161] FIG. 2A shows the basic design principle of a plasmid based system for integration of DNA into a bacterial chromosome mediated by a random cut and paste transposase.

[0162] FIG. 2B illustrates the use of positive selection in isolating mutants of interest. The 5′ITR (inverted terminal repeat recognized and cut by the transposase) and the lox66 site serve as a promoter for the erythromycin/clarythromycin antibiotic resistance marker mIsR. When located on the plasmid the expression of mIsR is deactivated by the repressor lacI, which binds to the lac operator sequence and blocks transcription. After transposition, the operator sequence the repressor lac operator sequence is gone and resistance is conferred, since mIsR is expressed and can be selected for (RBS=ribosome binding site).

[0163] FIG. 3A schematically depicts the mode of action of the implemented positive selection system. The repressor binding operator site blocks expression of antibiotic resistance gene. 32: 3-hydroxybutyryl-CoA dehydrogenase (EC 1.1.1.157); 34: 3-hydroxybutyryl-CoA dehydratase (EC 4.2.1.55); 36: acyl-CoA thioesterase [EC 3.1.2.-]; 38: aldehyde/alcohol dehydrogenase (EC 1.1.1.- and EC 1.2.1.-); 40: geraniol isomerase/linalool dehydratase (EC 5.4.4.4 and EC 4.2.1.127); 42: acetyl-CoA carboxylase (EC 6.4.1.2).

[0164] FIG. 3B schematically depicts the basic design principle of a plasmid based system for integration of DNA into a bacterial chromosome mediated by a random cut and paste transposase. 36: acyl-CoA thioesterase (EC 3.1.2.-); 38: aldehyde/alcohol dehydrogenase (EC 1.1.1.- and EC 1.2.1.-); 40: geraniol isomerase/linalool dehydratase (EC 5.4.4.4 and EC 4.2.1.127); 44: acetoacetyl-CoA synthase (EC 2.3.1.194).

[0165] FIG. 4A shows plasmid SG193 (SEQ ID NO: 1) which contains sequences encoding enzymes of a molybdenum nitrogenase pathway.

[0166] FIG. 4B shows plasmid SG211 (SEQ ID NO: 2) which contains sequences encoding enzymes of a vanadium nitrogenase pathway.

[0167] FIG. 4C shows plasmid SG278 (SEQ ID NO: 3) which contains sequences encoding enzymes of an iron nitrogenase pathway.

[0168] FIG. 4D shows plasmid SG323 (SEQ ID NO: 4) which contains a sequence encoding an engineered nitrogenase.

[0169] FIG. 5A shows plasmid SG123 (SEQ ID NO: 5) which contains sequences encoding enzymes of a MEP pathway together with kudzu 2-methyl-1,3-butadiene synthase.

[0170] FIG. 5B shows plasmid SG124 (SEQ ID NO: 6) which contains sequences encoding enzymes of a MEP pathway together with populus 2-methyl-1,3-butadiene synthase.

[0171] FIG. 6 shows plasmid SG156 (SEQ ID NO: 7) which contains sequences encoding enzymes of a MEP pathway together with kudzu 2-methyl-1,3-butadiene synthase.

[0172] FIG. 7 shows plasmid SG157 (SEQ ID NO: 8) which contains sequences encoding enzymes of a MEP pathway together with populus 2-methyl-1,3-butadiene synthase.

[0173] FIG. 8A depicts a GC-MS chromatogram in product analysis of the product 2-methyl-1,3-butadiene obtained by fermentative production with carbon dioxide and electrons as reactants using Clostridium ljungdahlii harbouring plasmid SG156.

[0174] FIG. 8B depicts a mass spectrum of the peak measured and depicted in FIG. 8A, which was identified as 2-methyl-1,3-butadiene.

[0175] FIG. 9 schematically depicts the vector pANT (SEQ ID NO: 9), a methylating-plasmid required for genetic transformation of Clostridium acetobutylicum.

[0176] FIG. 10 schematically depicts the vector BG132 (abbreviated T1, SEQ ID NO: 10), a plasmid for chromosomal integration via transposase containing the positive selection system for chromosomal integration.

[0177] FIG. 11 shows a vector map of the vector BG133 (abbreviated T2, SEQ ID NO: 11).

[0178] FIG. 12 shows a vector map of the vector BG134 (abbreviated T3, SEQ ID NO: 12).

[0179] FIG. 13 shows a vector map of the vector BG135 (abbreviated T4, SEQ ID NO: 13).

[0180] FIG. 14 shows a vector map of the vector BG136 (abbreviated H, SEQ ID NO: 14).

[0181] FIG. 15A depicts the separation of PCR by 0.8% analytic DNA agarose gel electrophoresis of Clostridium acetobutylicum DNA. Lane 1: standard; lanes 2-6: integrand 1 PCR 1-5; lanes 7-11: integrand 2 PCR 1-5; lane 12: standard; lanes 13-17: integrand 3 PCR 1-5; lanes 18-22: integrand 4 PCR 1-5; Lane 23-27: integrand 5 PCR 1-5; lane 28: standard.

[0182] FIG. 15B depicts the separation of PCR by 0.8% analytic DNA agarose gel electrophoresis. Lane 1: standard; lanes 2-6: integrand 6 PCR 1-5; lanes 7-11: integrand 7 PCR 1-5; lanes 12-16: integrand 8 PCR 1-5; lane 17: standard; lanes 18-22: wild type PCR 1-5; lanes 23-27: integrand 5 PCR 1-5; lane 28: standard.

[0183] FIG. 16 depicts fluorescence microscopy photos of integrands. FIG. 16A, 16B, 16C: Clostridium acetobutylicum integrand 1; FIG. 16D: Clostridium acetobutylicum integrand 2; FIG. 16E, 16F, 16G: Clostridium acetobutylicum integrand 2; FIG. 16H: Clostridium acetobutylicum wild type control.

[0184] FIG. 17 shows a vector map of the vector BG168 (abbreviated “I”, SEQ ID NO: 15).

[0185] FIG. 18 shows a vector map of the vector BG182 (SEQ ID NO: 16).

[0186] FIG. 19 shows a vector map of the vector BG282 (SEQ ID NO: 17).

[0187] FIG. 20 shows a vector map of the vector BG281 (SEQ ID NO: 18).

[0188] FIG. 21 shows a vector map of the vector BG287 (SEQ ID NO: 19).

[0189] FIG. 22 shows a vector map of the vector BG288 (SEQ ID NO: 20).

[0190] FIG. 23 shows a vector map of the vector BG289 (SEQ ID NO: 21).

[0191] FIG. 24 shows a vector map of the vector BG290 (SEQ ID NO: 22).

[0192] FIG. 25 shows a vector map of the vector BG291 (SEQ ID NO: 23).

[0193] FIG. 26 shows a vector map of the vector BG292 (SEQ ID NO: 24).

[0194] FIG. 27 shows a vector map of the vector BG178 (SEQ ID NO: 25).

[0195] FIG. 28 depicts the separation of PCR products by 0.8% analytic DNA agarose gel electrophoresis of Clostridium ljungdahlii DNA. Lane 1: standard; lanes 2-9: integrand LBI 105-111 PCR; lane 10: standard; lanes 11-18: integrand LBI 112-120 PCR; lane 19: standard; lanes 24-25: positive control PCR; lanes 26-27: negative control gDNA C. ljungdahlii gDNA PCR; lanes 28-29: negative control gDNA C. 3.

[0196] FIG. 29 depicts the separation of PCR products by 0.8% analytic DNA agarose gel electrophoresis of Clostridium autoethanogenum DNA. Lane 1: standard; lanes 2-5: integrand A1-A4 PCR; lanes 6-7: positive control PCR; lanes 8-9: negative control gDNA C. ljungdahlii gDNA PCR; lanes 10-11: negative control gDNA C. autoethanogenum gDNA PCR; lane 12: standard.

[0197] FIG. 30 schematically depicts the plasmid SG193 (SEQ ID NO: 26) which contains sequences encoding enzymes of a molybdenum nitrogenase pathway.

[0198] FIG. 31 schematically depicts the plasmid SG211 (SEQ ID NO: 27) which contains sequences encoding enzymes of a vanadium nitrogenase pathway.

[0199] FIG. 32 schematically depicts the plasmid SG278 (SEQ ID NO: 28) which contains sequences encoding enzymes of an iron nitrogenase pathway.

[0200] FIG. 33 schematically depicts the plasmid SG323 (SEQ ID NO: 29) which contains an engineered nitrogenase complex.

[0201] FIG. 34 schematically depicts the plasmid SG387 (SEQ ID NO: 30) which contains sequences encoding enzymes of a 1,3-butadiene pathway type 1 (crotonyl-CoA biosynthesis is derived from Clostridium acetobutylicum).

[0202] FIG. 35 schematically depicts the plasmid SG411 (SEQ ID NO: 31) which contains sequences encoding enzymes of a 1,3-butadiene pathway type 2 (crotonyl-CoA biosynthesis via malonyl-CoA is derived from Escherichia coli and other bacteria).

[0203] FIG. 36 schematically depicts the plasmid SG455 (SEQ ID NO: 32) which contains sequences encoding enzymes for propene biosynthesis.

[0204] FIG. 37 schematically depicts the plasmid SG479 (SEQ ID NO: 33) which contains sequences encoding enzymes for propene biosynthesis.

[0205] FIG. 38 schematically depicts the plasmid SG539 (SEQ ID NO: 34) which contains sequences encoding enzymes for 1-butene biosynthesis.

[0206] FIG. 39 schematically depicts the plasmid SG523 (SEQ ID NO: 35) which contains sequences encoding enzymes for 1-butene biosynthesis.

[0207] FIG. 40 schematically depicts the plasmid SG582 (SEQ ID NO: 36) which contains sequences encoding enzymes for isobutene biosynthesis.

[0208] FIG. 41 schematically depicts the plasmid SG601 (SEQ ID NO: 37) which contains sequences encoding enzymes for isobutene biosynthesis.

[0209] FIG. 42 schematically depicts the plasmid SG498 (SEQ ID NO: 38) which contains sequences encoding enzymes for 1-pentene biosynthesis.

[0210] FIG. 43 schematically depicts the plasmid SG513 (SEQ ID NO: 39) which contains sequences encoding enzymes for 1-pentene biosynthesis.

[0211] FIG. 44 schematically depicts the plasmid SG557 (SEQ ID NO: 40) which contains sequences encoding enzymes for ethene biosynthesis.

[0212] FIG. 45 schematically depicts the plasmid SG598 (SEQ ID NO: 41) which contains sequences encoding enzymes for ethene biosynthesis.

[0213] FIG. 46 schematically depicts the plasmid SG661 (SEQ ID NO: 42) which contains sequences encoding enzymes of a 1,3-butadiene pathway type 3 (crotonyl-CoA synthesis via malonyl-CoA is derived from Escherichia coli and other bacteria and the classical pathway from Clostridium acetobutylicum).

[0214] FIG. 47 schematically depicts the plasmid SG696 (SEQ ID NO: 43) which contains sequences encoding enzymes of a 1,3-butadiene pathway type 4 (crotonyl-CoA synthesis via glutamate and 4-aminobutanoate).

[0215] FIG. 48 schematically depicts the plasmid SG726 (SEQ ID NO: 44) which contains sequences encoding enzymes of a pathways for 2-methyl-1,3-butadiene biosynthesis and the positive selection system for chromosomal integration.

[0216] FIG. 49 schematically depicts the plasmid SG705 (SEQ ID NO: 45) which contains sequences encoding enzymes of a pathways for 2-methyl-1,3-butadiene biosynthesis and the positive selection system for chromosomal integration.

[0217] FIG. 50 schematically depicts the plasmid SG714 (SEQ ID NO: 46) which contains sequences encoding enzymes of a pathways for 1,3-butadiene biosynthesis and the positive selection system for chromosomal integration.

[0218] FIG. 51 schematically depicts the plasmid SG739 (SEQ ID NO: 47) which contains sequences encoding enzymes of a pathways for 1,3-butadiene biosynthesis and the positive selection system for chromosomal integration.

[0219] FIG. 52 schematically depicts the plasmid SG755 (SEQ ID NO: 48) which contains sequences encoding enzymes of pathways for propene biosynthesis and the positive selection system for chromosomal integration.

[0220] FIG. 53 schematically depicts the plasmid SG779 (SEQ ID NO: 49) which contains sequences encoding enzymes of pathways for propene biosynthesis and the positive selection system for chromosomal integration.

[0221] FIG. 54 schematically depicts the plasmid SG839 (SEQ ID NO: 50) which contains sequences encoding enzymes of pathways for 1-butene biosynthesis and the positive selection system for chromosomal integration.

[0222] FIG. 55 schematically depicts the plasmid SG823 (SEQ ID NO: 51) which contains sequences encoding enzymes of pathways for 1-butene biosynthesis and the positive selection system for chromosomal integration.

[0223] FIG. 56 schematically depicts the plasmid SG882 (SEQ ID NO: 52) which contains sequences encoding enzymes of pathways for isobutene biosynthesis and the positive selection system for chromosomal integration.

[0224] FIG. 57 schematically depicts the plasmid SG901 (SEQ ID NO: 53) which contains sequences encoding enzymes of pathways for isobutene biosynthesis and the positive selection system for chromosomal integration.

[0225] FIG. 58 schematically depicts the plasmid SG798 (SEQ ID NO: 54) which contains sequences encoding enzymes of pathways for 1-pentene biosynthesis and the positive selection system for chromosomal integration.

[0226] FIG. 59 schematically depicts the plasmid SG813 (SEQ ID NO: 55) which contains sequences encoding enzymes of pathways for 1-pentene biosynthesis and the positive selection system for chromosomal integration.

[0227] FIG. 60 schematically depicts the plasmid SG857 (SEQ ID NO: 56) which contains sequences encoding enzymes of pathways for ethene biosynthesis and the positive selection system for chromosomal integration.

[0228] FIG. 61 schematically depicts the plasmid SG898 (SEQ ID NO: 57) which contains sequences encoding enzymes of pathways for ethene biosynthesis and the positive selection system for chromosomal integration.

[0229] FIG. 62 lists the initial integration tests by serial transfer (positive selection) using plasmid N and plasmid I.

[0230] FIG. 63 shows the preparation of gDNA of the integrants obtains in the test depicted in FIG. 62. R/C: replicate/clone; Cla: Clarythromycin (μg/ml).

[0231] FIG. 64 shows the determination of loci of the integrants analysed in FIG. 63 by PCR genome walking.

[0232] FIG. 65 summarizes the protocol used for analyzing genomic DNA of integrands. GDNA concentrations were determined using a NanoDrop spectrophotometer (ThermoFisher Scientific Inc., Darmstadt, Germany).

[0233] FIG. 66 shows the enzymes encoded by exemplary plasmids disclosed herein. FIG. 66A shows the enzymes encoded by four plasmids that contains nucleic acid sequences of enzymes of pathways leading to the biosynthesis of isobutene. FIG. 66B shows the enzymes encoded by two plasmids that contains nucleic acid sequences of enzymes of pathways leading to the biosynthesis of isoprene. FIG. 66C shows the enzymes encoded by six plasmids that contains nucleic acid sequences of enzymes of pathways leading to the biosynthesis of isoprene.

[0234] FIG. 67A depicts a GC-MS chromatogram in product analysis of the product isobutene obtained by fermentative production with carbon dioxide and electrons as reactants using Clostridium ljungdahlii DSM 13528 harbouring plasmid SG601. (Inten.=intensity)

[0235] FIG. 67B depicts a mass spectrum of the peak measured and depicted in FIG. 67A, which was identified as isobutene. (Int.=intensity)

[0236] Throughout the drawings the following reference numerals apply:
[0237] 20—transposase (e.g. himar1)
[0238] 22—transposase recognition site (5′ ITR inverted terminal repeat)
[0239] 24—antibiotic resistance marker (mlsR)
[0240] 26—gene(s) of interest (cargo)
[0241] 28—transposase recognition site (3′ ITR inverted terminal repeat)
[0242] 30—origin of replication
[0243] 31—Acetoacetyl-Coenzyme A synthase thiolase (EC 2.3.1.9)=AtoB
[0244] 32—3-hydroxybutyryl-CoA dehydrogenase (EC 1.1.1.157)=hbd
[0245] 34—3-hydroxybutyryl-CoA dehydratase (EC 4.2.1.55)=crt
[0246] 36—acyl-CoA thioesterase (EC 3.1.2.-)=YciA, YdiI
[0247] 38—phenyl acrylic acid decarboxylase (EC 4.1.1.-)=PAD1, PADC
[0248] 40—geraniol isomerase/linalool dehydratase (EC 5.4.4.4 and EC 4.2.1.127)=GIM, GIT
[0249] 42—acetyl-CoA carboxylase (EC 6.4.1.2)=AccABCD
[0250] 44—acetoacetyl-CoA synthase (EC 2.3.1.194)=nphT7
[0251] 46—acetoacetyl-CoA reductase (EC 1.1.1.36)=phaB1
[0252] 48—(R)-specific enoyl-CoA hydratase (EC 4.2.1.119)=phaJ
[0253] 50—4-aminobutyrate aminotransferase (EC 2.6.1.19)=gabT
[0254] 52—glutamate dehydrogenase (EC 1.4.1.2)=gdh
[0255] 54—2-hydroxyglutarate dehydrogenase (EC 1.1.99.2)=ygaF
[0256] 56—glutaconate CoA-transferase (EC 2.8.3.12)=gctA
[0257] 58—2-hydroxyglutaryl-CoA dehydratase (EC 4.2.1.-)=hdgAB
[0258] 60—glutaconyl-CoA decarboxylase (EC 4.1.1.70)=gcdABCD
[0259] 62—4-hydroxybutyrate dehydrogenase, also called NAD-dependent 4-hydroxybutyrate dehydrogenase (EC 1.1.1.61)=4hbD
[0260] 64—4-hydroxybutyrate CoA-transferase (EC 2.8.3.-)=abfT
[0261] 66—vinylacetyl-CoA-Delta-isomerase (EC 4.2.1.120)=abfD
[0262] 68—4-hydroxybutyryl-CoA dehydratase (EC 5.3.3.3)=abfD
[0263] 70—acetoacetyl-Coenzyme A synthase thiolase (EC 2.3.1.9)=Bktb
[0264] 72—2-oxoglutarate/butyrate ferredoxin oxidoreductase, also called 2-ketoglutarate oxidoreductase (EC 1.2.7.3)=KorAB
[0265] 74—pyruvate/2-oxobutyrate ferredoxin oxidoreductase, also called pyruvate/ketoisovalerate oxidoreductase (EC 1.2.7.1)=PFOR
[0266] 76—methylmalonyl-CoA mutase (EC 5.4.99.2)=scpA
[0267] 78—methylmalonyl-CoA decarboxylase (EC 4.1.1.41)=scpB
[0268] 80—3-hydroxy-3-methylglutaryl-CoA synthase (EC 2.3.3.10)=mvaS
[0269] 82—3-methylglutaconyl-CoA hydratase (EC 4.2.1.18)=liuC
[0270] 84—3-methylcrotonyl-CoA carboxylase (EC 6.4.1.4)=liuBD
[0271] 86—trans-2-enoyl-CoA reductase (EC1.1.1.36)=ter
[0272] 88—acetyl-CoA acetyltransferase (EC 2.3.1.9)=Bktb
[0273] 90—3-hydroxybutyryl-CoA dehydrogenase (EC 1.1.1.157)=pAAH1
[0274] 92—acyl-CoA hydrolase (EC 3.1.2.-)=mBACH
[0275] 94—phosphate butyryltransferase (EC 2.3.1.19)=ptb
[0276] 96—butyrate kinase (EC 2.7.2.7)=buk
[0277] 100—lactate CoA-transferase (EC 2.8.3.-)=pct
[0278] 102—lactoyl-CoA dehydratase (EC 4.2.1.54)=lcdAB
[0279] 104—malonyl CoA reductase (EC 1.2.1.75)=mcr
[0280] 106—malonyl CoA reductase (EC 1.1.1.298)=mcr
[0281] 108—propionyl-CoA synthase (EC 6.2.1.36)=per
[0282] 110—propionyl-CoA synthase/acryloyl-CoA synthase (EC 4.2.1.116)=per, msed12
[0283] 112—propionyl-CoA synthase (EC 1.3.1.84)=per
[0284] 132—repressor (e.g. lacI)
[0285] 134—operator site (e.g. lac operator)
[0286] 136—transposase recognition site (5′ ITR inverted terminal repeat)
[0287] 138—antibiotic resistance gene (mlsR)
[0288] 140—antibiotic resistance protein (mlsR)
[0289] 142—plasmid with positive selection feature
[0290] 144—chromosome with randomly integrated DNA cassette
[0291] pMB1=origin of replication (E. coli)
[0292] repH=origin of replication (Clostridium)
[0293] catp=chloramphenicol/thiamphenicol resistance marker
[0294] lacI=lac repressor
[0295] tetR=tetracycline repressor
[0296] xylR=xylose repressor
[0297] himar=a transposase

### DETAILED DESCRIPTION

[0298] Before the present microorganism, composition, nucleic acid molecule, vector, host cell, and/or method is disclosed and described, it is to be understood that they are not limited to a specific synthetic method unless otherwise specified, or to particular reagents unless otherwise specified, as such may, naturally, vary. It is also to be understood that the terminology used herein is for the purpose of describing particular aspects only and is not intended to be limiting. Although any methods and materials similar or equivalent to those described herein can be used, example methods and materials are now described.

[0299] The use of a microorganism as provided herein allows a new method of obtaining one or more alkanes and/or alkenes with a chain length of 6 or less carbon atoms. The method utilizes gaseous C₁-carbon sources, including gaseous C₁-carbon sources and electrons.

[0300] Disclosed herein are, amongst others, methods of producing one or more alkanes and/or alkenes from carbon monoxide and/or carbon dioxide. The methods are based on the use of one or more non-naturally occurring microorganisms. The respective microorganisms are also disclosed herein. The microorganisms disclosed herein may have a capability of alkene biosynthesis. The microorganisms may also have a capability of alkane biosynthesis. In some embodiments the microorganisms may have a capability of alkane biosynthesis and alkene biosynthesis. The microorganisms disclosed herein are recombinant microorganisms that contain a heterologous nucleic acid sequence. The heterologous nucleic acid sequence contains one or more sequences encoding one or more enzymes. The respective enzyme(s) provide the recombinant microorganism with the capability of converting carbon monoxide and/or carbon dioxide to producing one or more alkanes and/or alkenes.

[0301] An alkene produced according to a method disclosed herein may in some embodiments be represented by the following formula:

[chemical structure]

[0302] In this formula R¹ may be an aliphatic carbon chain that may contain one double bond. In some embodiments R¹ does not contain a double bond. Typically R¹ is unbranched. In some embodiments R¹ may contain 4 carbon atoms. In some embodiments R¹ may contain 2 or 3 carbon atoms. R¹ may in some embodiments contain a single carbon atom. R² may be an unbranched aliphatic carbon chain that does not contain a double bond. Generally R² may contain 1 or 2 carbon atoms. In some embodiments R² is a methyl group. R² may also be a hydrogen atom.

[0303] Generally the microorganisms have been engineered to produce one or more alkanes and/or alkenes. The microorganisms have in some embodiments been engineered to produce one or more alkanes and/or alkenes from carbon monoxide and/or carbon dioxide. A microorganism disclosed herein may have been engineered on the basis of a naturally occurring microorganism that lacks a capability of alkene biosynthesis. In some embodiments a microorganism disclosed herein may have been engineered on the basis of a naturally occurring microorganism that lacks a capability of alkene biosynthesis from carbon monoxide and/or carbon dioxide. A microorganism disclosed herein may also have been engineered on the basis of a naturally occurring microorganism that lacks a capability of alkane biosynthesis. In some embodiments a microorganism disclosed herein may have been engineered on the basis of a naturally occurring microorganism that lacks a capability of alkane biosynthesis from carbon monoxide and/or carbon dioxide. In some embodiments a microorganism disclosed herein may have been engineered on the basis of a naturally occurring microorganism that lacks a capability of both alkane biosynthesis and alkene biosynthesis. In some embodiments a microorganism disclosed herein may have been engineered on the basis of a naturally occurring microorganism that lacks a capability of both alkane biosynthesis and alkene biosynthesis from carbon monoxide and/or carbon dioxide. Disclosed are also methods of making and using such organisms for the production of one or more alkanes and/or alkenes from carbon monoxide and/or carbon dioxide, including the design and production of microorganisms that have a capability of alkane and/or alkene biosynthesis

### Definitions

[0304] Unless otherwise stated, the following terms used in this document, including the description and claims, have the definitions given below.

[0305] As used in the specification and the appended claims, the singular forms “a”, “an” and “the” include plural referents unless the context clearly dictates otherwise. The word “or” as used herein means any one member of a particular list and also includes any combination of members of that list.

[0306] The word “about” as used herein refers to a value being within an acceptable error range for the particular value as determined by one of ordinary skill in the art, which will depend in part on how the value is measured or determined, i.e., the limitations of the measurement system. For example, “about” can mean within 1 or more than 1 standard deviation, per the practice in the art. The term “about” is also used to indicate that the amount or value in question may be the value designated or some other value that is approximately the same. The phrase is intended to convey that similar values promote equivalent results or effects as described. In this context “about” may refer to a range above and/or below of up to 10%. The word “about” refers in some embodiments to a range above and below a certain value that is up to 5%, such as up to up to 2%, up to 1%, or up to 0.5% above or below that value. In one embodiment “about” refers to a range up to 0.1% above and below a given value.

[0307] The term “allelic variant” denotes herein any of two or more alternative forms of a gene occupying the same chromosomal locus. Allelic variation arises naturally through mutation, and may result in polymorphism within populations. Gene mutations can be silent (no change in the encoded polypeptide) or may encode polypeptides having altered amino acid sequences. An allelic variant of a polypeptide is a polypeptide encoded by an allelic variant of a gene.

[0308] The term “alkane” means, unless otherwise stated, a saturated aliphatic molecule. A respective aliphatic molecule has a straight or branched hydrocarbon chain, which may include heteroatoms. In a method disclosed herein an alkane generally does not contain a heteroatom. The branches of the hydrocarbon chain may include linear chains. Generally an alkane formed in a method described herein does not contain cyclic elements. The hydrocarbon chain may, unless otherwise stated, be of any length, and contain any number of branches. A branch may be defined by an alkyl group such as a methyl, an ethyl or a propyl group. Typically, the hydrocarbon (main) chain of an alkane formed in a method described herein includes 1 to 8, such as 2 to 6 carbon atoms.

[0309] The term “alkene” means, unless otherwise stated, an unsaturated aliphatic molecule, which contains one or more double bonds. A respective aliphatic molecule has a straight or branched hydrocarbon chain, which may be mono- or poly-unsaturated and include heteroatoms. In a method disclosed herein an alkene generally does not contain a heteroatom. The presence of branches in the hydrocarbon chain has already been addressed above. Generally an alkene formed in a method described herein does not contain cyclic elements. Typically, the hydrocarbon (main) chain of an alkene formed in a method described herein includes 1 to 8, such as 2 to 6 carbon atoms

[0310] An “anaerobe” is an organism that does not require oxygen for growth. An anaerobe can be an obligate anaerobe, a facultative anaerobe, or an aerotolerant organism. An “obligate anaerobe” is an anaerobe for which atmospheric levels of oxygen can be lethal. Examples of obligate anaerobes include, but are not limited to, Clostridium, Eurobacterium, Bacteroides, Peptostreptococcus, Butyribacterium, Veillonella, and Actinomyces. A “facultative anaerobe” is an anaerobe that is capable of performing aerobic respiration in the presence of oxygen and is capable of performing anaerobic fermentation under oxygen-limited or oxygen-free conditions. Examples of facultative anaerobes include, but are not limited to, Escherichia, Pantoea, and Streptomyces.

[0311] The terms “carboxidotrophic organism” and “carboxidotroph” refers to an organism that can tolerate high concentrations of carbon monoxide, and generally capable of utilizing carbon monoxide for metabolism. A carboxydotrophic microorganism may furthermore obtain energy and carbon from the oxidation of CO. Such a carboxydotrophic microorganism may be an aerobic bacterium capable of oxidizing CO to carbon dioxide. A carboxydotrophic microorganism may also be an obligate anaerobe, which may be capable of reducing carbon dioxide to CO and/or converting CO to carbon dioxide and hydrogen. Some carboxydotrophic microorganisms that are an obligate anaerobe are acetogenic bacteria, e.g. Morella thermoacetica, and can form acetate from CO and/or CO₂.

[0312] When used herein the term “coding sequence” means a nucleotide sequence, which directly specifies the amino acid sequence of its protein product. The boundaries of the coding sequence are generally determined by an open reading frame, which usually begins with the ATG start codon or alternative start codons such as GTG and TTG and ends with a stop codon such as TAA, TAG, and TGA. The coding sequence may be a DNA, cDNA, synthetic or recombinant nucleotide sequence.

[0313] As used herein, the terms “conservative modification” and “conservative substitution” refer to a modification and a substitution, respectively, that maintains physically, biologically, chemically or functionally the properties with regard to the corresponding reference. A molecule that includes a sequence with conservative substitution for instance has a similar size, shape, electric charge, chemical properties, including a comparable ability to form covalent or hydrogen bonds, and/or comparable polarity. Such conservative modifications include, but are not limited to, one or more nucleobases and amino acid substitutions, additions and deletions.

[0314] For example, conservative amino acid substitutions include those in which the amino acid residue is replaced with an amino acid residue having a similar side chain. For example, amino acid residues being non-essential with regard to binding to an antigen can be replaced with another amino acid residue from the same side chain family, e.g. serine may be substituted for threonine Amino acid residues are usually divided into families based on common, similar side-chain properties, such as:
[0315] 1. nonpolar side chains (e.g., glycine, alanine, valine, leucine, isoleucine, methionine),
[0316] 2. uncharged polar side chains (e.g., asparagine, glutamine, serine, threonine, tyrosine, proline, cysteine, tryptophan),
[0317] 3. basic side chains (e.g., lysine, arginine, histidine),
[0318] 4. acidic side chains (e.g., aspartic acid, glutamic acid),
[0319] 5. beta-branched side chains (e.g., threonine, valine, isoleucine) and
[0320] 6. aromatic side chains (e.g., tyrosine, phenylalanine, tryptophan, histidine).
   This classification can be further segmented. As a further orientation, the following eight groups each contain amino acids that can typically be taken to define conservative substitutions for one another:
[0321] 1) Alanine (Ala), Glycine (Gly);
[0322] 2) Aspartic acid (Asp), Glutamic acid (Glu);
[0323] 3) Asparagine (Asn), Glutamine (Gln);
[0324] 4) Arginine (Arg), Lysine (Lys);
[0325] 5) Isoleucine (Ile), Leucine (Leu), Methionine (Met), Valine (Val);
[0326] 6) Phenylalanine (Phe), Tyrosine (Tyr), Tryptophan (Trp);
[0327] 7) Serine (Ser), Threonine (Thr); and
[0328] 8) Cysteine (Cys), Methionine (Met).
   A conservative substitution can be taken to be a substitution of a first amino acid within one of the six groups above by a further amino acid within the same group of the six groups. Conservative substitutions are generally the following substitutions, listed according to the amino acid to be mutated, each followed by one or more replacement(s) that can be taken to be conservative: Ala→Gly, Ser, Val; Arg→Lys; Asn→Gln, His; Asp→Glu; Cys→Ser; Gln→Asn; Glu→Asp; Gly→Ala; His→Arg, Asn, Gln; Ile→Leu, Val; Leu→Ile, Val; Lys→Arg, Gln, Glu; Met→Leu, Tyr, Ile; Phe→Met, Leu, Tyr; Ser→Thr; Thr→Ser; Trp→Tyr; Tyr→Trp, Phe; Val→Ile, Leu. Other substitutions are also permissible and can be determined empirically or in accord with other known conservative or non-conservative substitutions. A conservative substitution may also involve the use of a non-natural amino acid.

[0329] Non-conservative substitutions, i.e. exchanging members of one family against members of another family, may lead to substantial changes, e.g., with respect to the charge, dipole moment, size, hydrophilicity, hydrophobicity or conformation of the binding member, which may lead to a significant drop in the binding activity, in particular if amino acids are affected that are essential for binding to the target molecule. A non-conservative substitution may also involve the use of a non-natural amino acid.

[0330] Conservative and non-conservative modifications can be introduced into parental binding members by a variety of standard techniques known in the art, such as combinatorial chemistry, site-directed DNA mutagenesis, PCR-mediated and/or cassette mutagenesis, peptide/protein chemical synthesis, chemical reaction specifically modifying reactive groups in the parental binding member. The variants can be tested by routine methods for their chemical, biological, biophysical and/or biochemical properties. Preferably, the conservative amino acid substitution does not substantially change the functional, and generally also the structural characteristics of the parental sequence. Accordingly, the binding characteristics of a binding member that includes a conservative substitution are at least essentially unaltered. Furthermore, a conservative amino acid substitution does generally not substantially modify or disrupt a secondary structure of the parental sequence.

[0331] The term “endogenous” as used herein refers to a referenced molecule naturally present in the host. Accordingly, an “endogenous” enzyme, as used herein in the context of a microorganism, is an enzyme that is produced or synthesized from a nucleic acid sequence that is naturally a part of the same microorganism, such as a gene of the respective species.

[0332] The term “exogenous”, as used herein, is intended to mean that the referenced molecule, sequence or activity is or has been introduced into the host microbial organism. An exogenous nucleic acid molecule or sequence thus refers to any nucleic acid molecule or sequence that does not originate from that particular organism as found in nature. Thus, a non-naturally-occurring nucleic acid molecule or sequence is considered to be exogenous to a cell once introduced into the organism. The molecule or sequence can be introduced, for example, by introduction of an encoding nucleic acid molecule into the host genetic material such as by integration into a host chromosome or as non-chromosomal genetic material such as a plasmid. Therefore, the term as it is used in reference to expression of an encoding nucleic acid refers to introduction of the encoding nucleic acid in an expressible form into the microorganism. When used in reference to a biosynthetic activity, the term refers to an activity that is introduced into the host reference organism. The source can be, for example, a homologous or heterologous encoding nucleic acid that expresses the referenced activity following introduction into the host microorganism.

[0333] It is important to note that a non-naturally-occurring nucleic acid molecule or sequence can contain nucleic acid sequences or fragments of nucleic acid sequences that are found in nature, provided the nucleic acid as a whole does not exist in nature. For example, a nucleic acid molecule containing a genomic DNA sequence within an expression vector is a non-naturally-occurring nucleic acid molecule, and thus is exogenous to a cell once introduced into the cell, since that nucleic acid molecule as a whole (genomic DNA plus vector DNA) does not exist in nature. Thus, any vector, autonomously replicating plasmid, or virus (e.g., retrovirus, adenovirus, or herpes virus) that as a whole does not exist in nature is considered to be non-naturally-occurring nucleic acid. It follows that a genomic DNA fragment produced by PCR or restriction endonuclease treatment as well as a cDNA is considered to be non-naturally-occurring nucleic acid since they exist as separate molecules not found in nature. It also follows that any nucleic acid containing a promoter sequence and polypeptide-encoding sequence (e.g., cDNA or genomic DNA) in an arrangement not found in nature is non-naturally-occurring nucleic acid. Nucleic acid that is naturally-occurring can be exogenous to a particular organism. For example, an entire chromosome isolated from a cell of organism X is an exogenous nucleic acid with respect to a cell of organism Y once that chromosome is introduced into organism's cell.

[0334] The terms “expressing” and “expression” in reference to a protein define that a sequence included in a nucleic acid molecule and encoding a peptide/protein is converted into its peptide/protein product. Where the nucleic acid is DNA, a protein such as an enzyme is expressed by a cell via transcription of a nucleic acid into mRNA, followed by translation into a polypeptide, which is folded and possibly further processed. Where the nucleic acid is RNA, expression may include the replication of this RNA into further RNA copies and/or the reverse transcription of the RNA into DNA and optionally the transcription of this DNA into further RNA molecule(s). In any case expression of RNA includes the translation of any of the RNA species provided/produced into protein. Hence, the statement that a cell is expressing a protein implies that the protein has been synthesized by the expression machinery of the respective cell. With regard to the respective biological process itself, the terms “expression”, “gene expression” or “expressing” refer to the entirety of regulatory pathways converting the information encoded in the nucleic acid sequence of a gene first into messenger RNA (mRNA) and then to a protein. Accordingly, the expression of a gene includes its transcription into a primary hnRNA, the processing of this hnRNA into a mature RNA and the translation of the mRNA sequence into the corresponding amino acid sequence of the protein. In this context, it is also noted that the term “gene product” refers not only to a protein, including e.g. a final protein (including a splice variant thereof) encoded by that gene and a respective precursor protein where applicable, but also to the respective mRNA, which may be regarded as the “first gene product” during the course of gene expression. Expression of a protein or peptide may be carried out using an in vitro expression system. Such an expression system may include a cell extract, typically from bacteria, rabbit reticulocytes or wheat germ. Many suitable systems are commercially available. The mixture of amino acids used may include synthetic amino acids if desired, to increase the possible number or variety of proteins produced in the library. This can be accomplished by charging tRNAs with artificial amino acids and using these tRNAs for the in vitro translation of the proteins to be selected. A suitable embodiment for expression purposes is the use of a vector, in particular an expression vector.

[0335] As used herein, the term “expression cassette” refers to a nucleic acid molecule capable of directing expression of a particular nucleotide sequence in an appropriate host cell. An expression cassette includes a promoter operatively linked to the nucleotide sequence of interest, which is operatively linked to one or more termination signals. It may also include sequences required for proper translation of the nucleotide sequence. The coding region can encode a polypeptide of interest and can also encode a functional RNA of interest, including but not limited to, antisense RNA or a non-translated RNA, in the sense or antisense direction. The expression cassette contains the nucleotide sequence of interest can be chimeric, meaning that at least one of its components is heterologous with respect to at least one of its other components. The expression cassette can also be one that is naturally occurring but has been obtained in a recombinant form useful for heterologous expression. In some embodiments, however, the expression cassette is heterologous with respect to the host; i.e., the particular nucleic acid sequence of the expression cassette does not occur naturally in the host cell and was introduced into the host cell or an ancestor of the host cell by a transformation event. The expression of the nucleotide sequence in the expression cassette can be under the control of a constitutive promoter or of an inducible promoter that initiates transcription only when the host cell is exposed to some particular external stimulus. In the case of a multicellular organism such as a plant or an animal, the promoter can also be specific to a particular tissue, organ, or stage of development.

[0336] Unless the context requires otherwise, the phrases “fermenting”, “fermentation process” and “fermentation reaction” when used herein, refer to an enzymatic conversion of compounds. The respective compounds are generally organic compounds and include gaseous carbon compounds such as carbon monoxide and carbon dioxide. The enzymatic conversion of reactants to product compounds typically involves cells, which encompass and/or produce the enzymes required for the enzymatic conversion. A fermentation process includes the culture of cells, regardless of their stage, density and/or growth condition. For instance both the growth phase and the product biosynthesis phase of the process are intended to be encompassed. In this regard, in some embodiments a bioreactor may contain a first growth reactor and a second fermentation reactor. As such, the addition of metals or compositions to a fermentation reaction should be understood to include addition to either or both of these reactors.

[0337] A “fermentation broth” as used herein is a culture medium that contains a nutrient media and bacterial cells.

[0338] By “gene” is meant a unit of inheritance that occupies a specific locus on a chromosome and that is a segment of nucleic acid associated with a biological function. A gene encompasses transcriptional and/or translational regulatory sequences as well as a coding region. Besides a coding sequence a gene may include a promoter region, a cis-regulatory sequence, a non-expressed DNA segment that is a specific recognition sequence for regulatory proteins, a non-expressed DNA segment that contributes to gene expression, a DNA segment designed to have desired parameters, or combinations thereof. A gene can be obtained by a variety of methods, including cloning from a biological sample, synthesis based on known or predicted sequence information, and recombinant derivation of an existing sequence.

[0339] A “homologous” enzyme, as used herein in the context of a microorganism, is an enzyme that is produced or synthesized from a nucleic acid sequence that is naturally a part of a microorganism of the same species. A homologous enzyme may thus be an enzyme that is identical to the enzyme encoded by a gene of a microorganism, but it may have been introduced into the microorganism by way of genetic engineering. The respective enzyme can in such a case not be distinguished from the microorganism's own respective enzyme. Some enzymes exist in form of different isoforms within the same species. Hence, in such a case some members of the same species have a first isoform while other members of the species have a second isoform. A homologous enzyme may be either isoform. In other words a homologous enzyme may be an isoform of an enzyme that is different from the enzyme encoded by a gene of the particular microorganism, but it may be an isoform of the enzyme that is found in some other members of the same species.

[0340] The term “homologous sequence”, as used herein, refers to the sequence similarity between two polymeric molecules, e.g., between two nucleic acid molecules, e.g., two DNA molecules or two RNA molecules, or between two polypeptide molecules. Two sequences can be termed homologous if a tfasty search for a given sequence results in an expectancy score (E value) of less than 0.001 for a further sequence.

[0341] As used herein, the term “heterologous” refers to a molecule or activity derived from a source other than the referenced species whereas “homologous” refers to a molecule or activity derived from the host microbial organism. Accordingly, exogenous expression of an encoding nucleic acid as described herein can utilize either or both a heterologous or homologous encoding nucleic acid. A “heterologous” enzyme, as used herein in the context of a microorganism, is an enzyme that is produced or synthesized from a nucleic acid sequence that naturally occurs in a species that differs from the species of the respective microorganism.

[0342] The terms “identity” or “sequence identity” in the context of an amino acid sequence or nucleic acid sequence refers to the sequence match between two proteins or nucleic acids. The trem thus defines a property of sequences that measures their similarity or relationship. The protein or nucleic acid sequences to be compared are aligned to give maximum identity. Methods for aligning sequences for comparison are well known in the art. An illustrative example is the NCBI Basic Local Alignment Search Tool (BLAST™; Altschul et al., J. Mol. Biol. (1990) 215, 403-410), available from several sources, including the National Center for Biotechnology Information (NCBI, Bethesda, Md., U.S.A.), which can be used in connection with the sequence analysis programs blastp, blastn, blastx, tblastn and tblastx. BLAST™ can be accessed on the Internet at the NCBI website. A further example is the tool EMBOSS Needle (pair wise alignment; available at www.ebi.ac.uk). When the same position in the sequences to be compared is occupied by the same nucleobase or amino acid residue, then the respective molecules are identical at that very position. The “sequence identity” or “identity” can be taken to define the percentage of pair-wise identical residues—following (homology) alignment of a sequence of a particular polypeptide with a reference sequence—with respect to the number of residues in the longer of these two sequences. Identity is measured by dividing the number of identical residues by the total number of residues and multiplying the product by 100. For instance, if 6 out of 10 sequence positions are identical, then the identity is 60%. The percent identity between two protein sequences can, e.g., be determined using the Needleman and Wunsch algorithm (NEEDLEMAN, S. B. and Wunsch, C. D., JMB (1970,) 48, 443-453) which has been incorporated into EMBOSS Needle, using a BLOSUM62 matrix, a “gap open penalty” of 10, a “gap extend penalty” of 0.5, a false “end gap penalty”, an “end gap open penalty” of 10 and an “end gap extend penalty” of 0.5. Two molecules having the same primary amino acid or nucleic acid sequence are identical irrespective of any chemical and/or biological modification. For example, two enzymes having the same primary amino acid sequence but different glycosylation patterns are identical by this definition. In case of nucleic acids, for example, two molecules having the same sequence but different linkage components such as thiophosphate instead of phosphate are identical by this definition.

[0343] The percentage of sequence homology or sequence identity can, for example, be determined using the program BLASTP, e.g. version blastp 2.2.5 (Nov. 16, 2002; cf. Altschul, S. F. et al. (1997) Nucl. Acids Res. 25, 3389-3402). In this embodiment the percentage of homology may be based on the alignment of the entire polypeptide sequences (matrix: BLOSUM 62; gap costs: 11.1; cutoff value set to 10⁻³) including the propeptide sequences, using the known native protein as reference in a pairwise comparison. It is calculated as the percentage of numbers of “positives” (homologous amino acids) indicated as result in the BLASTP program output divided by the total number of amino acids selected by the program for the alignment. It is noted in this connection that this total number of selected amino acids can differ from the length of the known native protein.

[0344] The term “mutated” or “mutant” in reference to a nucleic acid or a polypeptide refers to the exchange, deletion, or insertion of one or more nucleotides or amino acids, respectively, compared to the naturally occurring nucleic acid molecule or polypeptide. A respective mutant may for instance include one or more substitutions in comparison to the corresponding native amino acid sequence or nucleic acid sequence.

[0345] The term “mutagenesis” as used herein means that the experimental conditions are chosen such that the amino acid naturally occurring at a given sequence position of a selected protein can be substituted by at least one amino acid that is not present at this specific position in the respective natural polypeptide sequence. As already noted above, the term “mutagenesis” also includes the (additional) modification of the length of sequence segments by deletion or insertion of one or more amino acids. Thus, for example, one amino acid at a chosen sequence position may replaced by a stretch of three random mutations, leading to an insertion of two amino acid residues compared to the length of the respective segment of the wild type protein. Such an insertion of deletion may be introduced independently from each other in any of the peptide segments that can be subjected to mutagenesis. The term “random mutagenesis” means that no predetermined single amino acid (mutation) is present at a certain sequence position but that at least two amino acids can be incorporated with a certain probability at a predefined sequence position during mutagenesis.

[0346] The coding sequence of a selected protein may be used as a starting point for mutagenesis. For the mutagenesis of a selected amino acid position, the person skilled in the art has at his disposal various established standard methods for site-directed mutagenesis. A commonly used technique is the introduction of mutations by means of PCR (polymerase chain reaction) using mixtures of synthetic oligonucleotides, which bear a degenerate base composition at the desired sequence positions. For example, use of the codon NNK or NNS (wherein N=adenine, guanine or cytosine or thymine; K=guanine or thymine; S=adenine or cytosine) allows incorporation of all 20 amino acids plus the amber stop codon during mutagenesis, whereas the codon VVS limits the number of possibly incorporated amino acids to 12, since it excludes the amino acids Cys, Ile, Leu, Met, Phe, Trp, Tyr, Val from being incorporated into the selected position of the polypeptide sequence; use of the codon NMS (wherein M=adenine or cytosine), for example, restricts the number of possible amino acids to 11 at a selected sequence position since it excludes the amino acids Arg, Cys, Gly, Ile, Leu, Met, Phe, Trp, Val from being incorporated at a selected sequence position. In this respect it is noted that codons for amino acids that differ from the regular 20 naturally occurring amino acids, such as selenocystein or pyrrolysine can also be incorporated into a nucleic acid. It is also possible, as described by Wang, L., et al. Science (2001) 292, 498-500, or Wang, L., and Schultz, P. G. Chem. Comm. (2002) 1, 1-11, to use “artificial” codons such as UAG which are usually recognized as stop codons in order to insert other unusual amino acids, for example o-methyl-L-tyrosine or p-aminophenylalanine. The use of nucleotide building blocks with reduced base pair specificity, as for example inosine, 8-oxo-2′deoxyguanosine or 6(2-deoxy-β-D-ribofuranosyl)-3,4-dihydro-8H-pyrimido-1,2-oxazine-7-one (Zaccolo et al. J. Mol. Biol. (1996) 255, 589-603), is another option for the introduction of mutations into a chosen sequence segment. A further possibility is the so-called triplet-mutagenesis. This method uses mixtures of different nucleotide triplets, each of which codes for one amino acid, for incorporation into the coding sequence (Virnekäs et al., Nucleic Acids Res (1994) 22, 5600-5607).

[0347] The term “non-naturally occurring” when used herein in the context of a microorganism is intended to mean that the microorganism has one or more genetic alterations not normally found in a naturally occurring strain of the referenced species, including wild-type strains of the referenced species. Genetic alterations include, for example, modifications introducing an expressible nucleic acid sequence that encodes metabolic polypeptides, in particular one or more enzymes. A respective expressible nucleic acid sequence may be included in the genome of the microorganism, or it may be included in a nucleic acid molecule that is different from the genome of the microorganism. Genetic alterations may also include other nucleic acid additions, nucleic acid deletions and/or other functional disruption of the microbial organism's genetic material. Such modifications include, for example, coding regions and functional fragments thereof, for heterologous, homologous or both heterologous and homologous polypeptides for the referenced species. Additional modifications include, for example, non-coding regulatory regions in which the modifications alter expression of a gene or operon. Exemplary metabolic polypeptides include enzymes or proteins within an alkene biosynthetic pathway.

[0348] A metabolic modification refers to a biochemical reaction that is altered from its naturally occurring state. Accordingly, a non-naturally occurring microorganism can have a genetic modification to a nucleic acid that encodes a metabolic polypeptide, or a functional fragment thereof

[0349] The term “nucleic acid molecule” as used herein refers to any nucleic acid in any possible configuration, such as single stranded, double stranded or a combination thereof. Examples of nucleic acids include for instance DNA molecules, RNA molecules, analogues of the DNA or RNA generated using nucleotide analogues or using nucleic acid chemistry, locked nucleic acid molecules (LNA), protein nucleic acids molecules (PNA), alkylphosphonate and alkylphosphotriester nucleic acid molecules and tecto-RNA molecules (e.g. Liu, B., et al., J. Am. Chem. Soc. (2004) 126, 4076-4077). LNA has a modified RNA backbone with a methylene bridge between C4′ and O2′, providing the respective molecule with a higher duplex stability and nuclease resistance. Alkylphosphonate and alkylphosphotriester nucleic acid molecules can be viewed as a DNA or an RNA molecule, in which phosphate groups of the nucleic acid backbone are neutralized by exchanging the P—OH groups of the phosphate groups in the nucleic acid backbone to an alkyl and to an alkoxy group, respectively. DNA or RNA may be of genomic or synthetic origin and may be single or double stranded. Such nucleic acid can be e.g. mRNA, cRNA, synthetic RNA, genomic DNA, cDNA synthetic DNA, a copolymer of DNA and RNA, oligonucleotides, etc. A respective nucleic acid may furthermore contain non-natural nucleotide analogues and/or be linked to an affinity tag or a label.

[0350] Many nucleotide analogues are known and can be used in nucleic acids used in the methods described herein. A nucleotide analogue is a nucleotide containing a modification at for instance the base, sugar, or phosphate moieties. As an illustrative example, a substitution of 2′-OH residues of siRNA with 2′F, 2′O-Me or 2′H residues is known to improve the in vivo stability of the respective RNA. Modifications at the base moiety may be a natural or a synthetic modification of A, C, G, and T/U, a different purine or pyrimidine base, such as uracil-5-yl, hypoxanthin-9-yl, and 2-aminoadenin-9-yl, as well as a non-purine or a non-pyrimidine nucleotide base. Other nucleotide analogues serve as universal bases. Examples of universal bases include 3-nitropyrrole and 5-nitroindole. Universal bases are able to form a base pair with any other base. Base modifications often can be combined with for example a sugar modification, such as for instance 2′-O-methoxyethyl, e.g. to achieve unique properties such as increased duplex stability.

[0351] The term “nucleic acid construct” as used herein refers to a nucleic acid molecule, either single- or double-stranded, which is isolated from a naturally occurring gene or which is modified to contain segments of nucleic acids in a manner that would not otherwise exist in nature or which is synthetic. The term nucleic acid construct is synonymous with the term “expression cassette” when the nucleic acid construct contains the control sequences required for expression of a particular coding sequence.

[0352] The term “operatively linked to” refers to the functional relationship of a nucleic acid sequence with another nucleic acid sequence. Promoters, enhancers, transcriptional and translational stop sites, and other signal sequences are examples of nucleic acid sequences operatively linked to other sequences. For example, operative linkage of DNA to a transcriptional control element refers to the physical and functional relationship between the DNA and promoter such that the transcription of such DNA is initiated from the promoter by an RNA polymerase that specifically recognizes, binds to and transcribes the DNA.

[0353] As used herein, the terms “polypeptide” and “protein” refer to a polymer of amino acid residues and are not limited to a certain minimum length of the product. Where both terms are used concurrently, this twofold naming accounts for the use of both terms side by side in the art.

[0354] The term “promoter” as used throughout this document, refers to a nucleic acid sequence needed for gene sequence expression. Promoter regions vary from organism to organism, but are well known to those skilled in the art for different organisms. For example, in prokaryotes, the promoter region contains both the promoter (which directs the initiation of RNA transcription) as well as the DNA sequences which, when transcribed into RNA, will signal synthesis initiation. Such regions will normally include those 5′-non-coding sequences involved with initiation of transcription and translation, such as the TATA box, capping sequence, CAAT sequence, and the like. Both constitutive and inducible promoters can be used in the context of a method disclosed herein. A large number of promoters recognized by a variety of potential host cells are well known. The selected promoter can be operably linked to cistron DNA encoding a polypeptide described herein by removing the promoter from the source DNA via restriction enzyme digestion and inserting the isolated promoter sequence into the vector of choice. Both the native promoter sequence and many heterologous promoters may be used to direct amplification and/or expression of a selected nucleic acid sequence.

[0355] The word “recombinant” is used in this document to describe a nucleic acid molecule that, by virtue of its origin, manipulation, or both is not associated with all or a portion of the nucleic acid molecule with which it is associated in nature. Generally a recombinant nucleic acid molecule includes a sequence which does not naturally occur in the respective wildtype organism or cell. Typically a recombinant nucleic acid molecule is obtained by genetic engineering, usually constructed outside of a cell. Generally a recombinant nucleic acid molecule is substantially identical and/or substantial complementary to at least a portion of the corresponding nucleic acid molecule occurring in nature. A recombinant nucleic acid molecule may be of any origin, such as genomic, cDNA, mammalian, bacterial, viral, semisynthetic or synthetic origin The term “recombinant” as used with respect to a protein/polypeptide means a polypeptide produced by expression of a recombinant polynucleotide.

[0356] “Similar” protein sequences are those which, when aligned, share similar amino acid residues and most often, but not mandatorily, identical amino acid residues at the same positions of the sequences to be compared. Similar amino acid residues are grouped by chemical characteristics of the side chains into families. These families are described below for “conservative amino acid substitutions”. The “percent similarity” between sequences is the number of positions that contain identical or similar residues at the same sequence positions of the sequences to be compared divided by the total number of positions compared and multiplied by 100%. For instance, if 6 out of 10 sequence positions have identical amino acid residues and 2 out of 10 positions contain similar residues, then the sequences have 80% similarity. The similarity between two sequences can e.g. be determined using EMBOSS Needle.

[0357] The term “stringent conditions” refers to the technique of hybridizing nucleic acid molecules. Nucleic acid hybridization reactions can be performed under conditions of different stringency. “Stringent conditions” are widely known and published in the art. Typically, during the hybridization reaction a SSC-based buffer can be used in which SSC is 0.15 M NaCl and 15 mM citrate buffer having a pH of 7.0. Increasing buffer concentrations and the presence of a denaturing agent increase the stringency of the hybridization step. For example, high stringency hybridization conditions can involve the use of (i) 50% (v/v) formamide, 5×SSC (0.75 M NaCl, 0.075 M sodium citrate), 50 mM sodium phosphate (pH 6.8), 0.1% sodium pyrophosphate, 5×Denhardt's solution, sonicated salmon sperm DNA (50 μg/mL), 0.1% SDS, and 10% dextran sulphate at 42° C. with washes at 42° C. in 0.2×SSC and 0.1% SDS; (ii) 50% (v/v) formamide with 0.1% bovine serum albumin/0.1% Ficoll/0.1% polyvinylpyrrolidone/50 mM sodium phosphate buffer at pH 6.5 with 750 mM sodium chloride, 75 mM sodium citrate at 42° C., or (iii) 10% dextran sulphate, 2×SSC, and 50% formamide at 55° C., followed by a high-stringency wash consisting of 0.1×SSC containing EDTA at 55° C. Additionally or alternatively, one, two or more washing steps using wash solutions of low ionic strength and high temperature can be included in the hybridization protocol using, for example, 0.015 M sodium chloride/0.0015 M sodium citrate/0.1% sodium dodecyl sulphate at 50° C.

[0358] The term “syngas” refers to a mixture of carbon monoxide, carbon dioxide and hydrogen.

[0359] The terms “transposon” or “transposable element”, as used herein, are meant to refer to a nucleotide sequence that is able to excise or copy from a donor polynucleotide, for instance, a vector, and integrate into a target site, for instance, a cell's genomic or extrachromosomal DNA. The process of excising or copying a defined DNA segment from one nucleic acid molecule and moving the same to another site in the same or a different nucleic acid molecule is called transposition. A transposon may be a “class 2” element, also called “DNA transposon”. Class 2 elements are excised from a donor polynucleotide and inserted into a target nucleic acid molecule. This process is catalyzed by a functional transposase protein. The transposase protein is in some cases encoded by the transposon. Such a transposon is also termed an autonomous transposon. A transposon contains a nucleic acid sequence flanked by cis-acting nucleotide sequences on the termini of the transposon. A nucleic acid sequence is “flanked by” cis-acting nucleotide sequences if at least one cis-acting nucleotide sequence is positioned 5′ to the nucleic acid sequence, and at least one cis-acting nucleotide sequence is positioned 3′ to the nucleic acid sequence. For class 2 elements the cis-acting nucleotide sequences include at least one inverted repeat (also referred to herein as an inverted terminal repeat, or ITR) at each end of the transposon, to which the transposase binds. A transposon may also be a “class 1” element, also called “retrotransposon”. A class 1 element does not encode a transposase enzyme; rather, it produces RNA transcripts and then relies upon reverse transcriptase enzymes to reverse transcribe the RNA sequence(s) into DNA, which is then inserted into the target site. A class 1 element is copied from a donor polynucleotide, i.e. it leaves behind the original copy and generates a second copy that is inserted into the target site. Class 1 elements are divided into autonomous and nonautonomous classes depending on whether they do or do not encompass a sequence that encodes proteins required for retrotransposition. The capability of a transposon to excise or copy from a donor polynucleotide and integrate into a target site can be silenced, for example by methylation and/or small interfering RNA molecules.

[0360] A “variant” refers to an amino acid or nucleic acid sequence which differs from the parental sequence by virtue of addition (including insertions), deletion and/or substitution of one or more amino acid residues or nucleobases while retaining at least one desired activity of the parent sequence disclosed herein. In the case of an enzyme such desired activity may include specific substrate binding. Similarly, a variant nucleic acid sequence may be modified when compared to the parent sequence by virtue of addition, deletion and/or substitution of one or more nucleobases, but the encoded protein, e.g. enzyme, retains the desired activity as described above. Variants may be naturally occurring, such as allelic or splice variants, or may be artificially constructed.

[0361] The term “vector”, sometimes also referred to as gene delivery system or gene transfer vehicle, relates to a macromolecule or complex of molecules that include(s) a polynucleotide to be delivered to a host cell, whether in vitro, ex vivo or in vivo. Typically a vector is a single or double-stranded circular nucleic acid molecule that allows or facilitates the transfer of a nucleic acid sequence into a cell. A vector can generally be transfected into cells and replicated within or independently of a cell genome. A circular double-stranded nucleic acid molecule can be cut and thereby linearized upon treatment with restriction enzymes. An assortment of nucleic acid vectors, restriction enzymes, and the knowledge of the nucleotide sequences cut by restriction enzymes are readily available to those skilled in the art. A nucleic acid molecule encoding a peptide, such as a sequence that encodes the amino acid sequence of GenBank accession no. WP_003251320.1 or a homolog thereof, and/or a sequence encoding the amino acid sequence of GenBank accession no. WP_003243190.1 or a homolog thereof, can be inserted into a vector by cutting the vector with restriction enzymes and ligating the two pieces together. A vector may for instance be a viral vector, such as a retroviral vector, a Lentiviral vector, a herpes virus based vector or an adenoviral vector. A vector may also be a plasmid vector, which is also a typical example of a prokaryotic vector. A respective plasmid may in some embodiments be a plasmid capable of replication in E. coli, such as, for example, pBR322, ColEl, pSC101, pACYC 184 or πVX. Bacillus plasmids include pC194, pC221 or pT127. Suitable Streptomyces plasmids include p1θ101, and streptomyces bacteriophages such as φC31. A vector may also be a liposome-based extrachromosomal vector, also called episomal vector. Two illustrative examples of an episomal vector are an oriP-based vector and a vector encoding a derivative of EBNA-1. Lymphotrophic herpes virus is a herpes virus which replicates in a lymphoblast and becomes a plasmid for a part of its natural life-cycle. A vector may also be based on an organically modified silicate. In some embodiments a vector may be a transposon-based system, as explained above.

[0362] The terms “comprising”, “including,” containing”, “having” etc. shall be read expansively or open-ended and without limitation. Singular forms such as “a”, “an” or “the” include plural references unless the context clearly indicates otherwise. Thus, for example, reference to a “vector” includes a single vector as well as a plurality of vectors, either the same—e.g. the same operon—or different. Likewise reference to “cell” includes a single cell as well as a plurality of cells. Unless otherwise indicated, the term “at least” preceding a series of elements is to be understood to refer to every element in the series. The terms “at least one” and “at least one of” include for example, one, two, three, four, or five or more elements. It is furthermore understood that slight variations above and below a stated range can be used to achieve substantially the same results as a value within the range. Also, unless indicated otherwise, the disclosure of ranges is intended as a continuous range including every value between the minimum and maximum values.

[0363] The scope and meaning of any use of a term will be apparent from the specific context in which the term is used. Certain further definitions for selected terms used throughout this document are given in the appropriate context of the detailed description, as applicable. Unless otherwise defined, all other scientific and technical terms used in the description, figures and claims have their ordinary meaning as commonly understood by one of ordinary skill in the art.

[0364] Various aspects of the disclosure are described in further detail in the following subsections. It is understood that the various embodiments, preferences and ranges may be combined at will. Further, depending of the specific embodiment, selected definitions, embodiments or ranges may not apply.

### Enzymes and Pathways

[0365] A recombinant microorganism as described herein generally contains one or more heterologous nucleic acid sequences that provide, complete or enhance a biosynthesis pathway. The A recombinant microorganism described herein is generally capableof expressing a number of enzymes that together define a biosynthesis pathway leading to the formation of an alkane and/or an alkene. One or more of the enzymes of the biosynthesis pathway are encoded by a heterologous nucleic acid sequence. Typically the enzymes of the biosynthesis pathway are expressed in a sufficient amount to allow production of an alkane and/or alkene. Thereby the recombinant microorganism may be capable of converting carbon monoxide and/or carbon dioxide to an alkane and/or alkene. A recombinant microorganism as described herein may contain nucleic acid sequences encoding enzymes of a pathway leading to the formation of methane. In some embodiments a recombinant microorganism described herein may contain nucleic acid sequences encoding enzymes of a pathway leading to the formation of ethane.

[0366] A recombinant microorganism as described herein may contain nucleic acid sequences that encode enzymes of a pathway leading to the formation of ethene. One or more of these enzymes may be encoded by a heterologous nucleic acid sequence. A respective heterologous nucleic acid sequence may originate from a heterologous nucleic acid molecule. In some embodiments the recombinant microorganism may contain nucleic acid sequences that encode all enzymes of a pathway leading to the formation of ethane. In some embodiments the recombinant microorganism does not contain nucleic acid sequences encoding all enzymes of a pathway leading to the formation of ethane. In some embodiments a recombinant microorganism as described herein may be capable of producing ethene. In some embodiments a recombinant microorganism as described herein is not capable of producing ethane. A recombinant microorganism disclosed herein may contain nucleic acid sequences encoding enzymes of a pathway leading to the formation of propane. One or more of these enzymes may be encoded by a heterologous nucleic acid sequence. In some embodiments the recombinant microorganism may contain nucleic acid sequences that encode all enzymes of a pathway leading to the formation of propane. In some embodiments the recombinant microorganism does not contain nucleic acid sequences encoding all enzymes of a pathway leading to the formation of propane. In some embodiments a recombinant microorganism as described herein is capable of producing propane.

[0367] A recombinant microorganism as described herein may contain nucleic acid sequences encoding enzymes of a pathway leading to the formation of propene. One or more of these enzymes may be encoded by a heterologous nucleic acid sequence. In some embodiments two or three of these enzymes may be encoded by a heterologous nucleic acid sequence. As noted above, a respective heterologous nucleic acid sequence may originate from a heterologous nucleic acid molecule. In some embodiments the recombinant microorganism may contain nucleic acid sequences that encode all enzymes of a pathway leading to the formation of propene. In some embodiments the recombinant microorganism does not contain nucleic acid sequences encoding all enzymes of a pathway leading to the formation of propene. A recombinant microorganism as described herein may in some embodiments be capable of producing propene. In some embodiments a recombinant microorganism as described herein is not capable of producing propene. A recombinant microorganism disclosed herein may contain nucleic acid sequences encoding enzymes of a pathway leading to the formation of n-butane. One or more of the enzymes of this pathway may be encoded by a heterologous nucleic acid sequence. In some embodiments the recombinant microorganism may contain nucleic acid sequences that encode all enzymes of a pathway leading to the formation of n-butane. In some embodiments the recombinant microorganism does not contain nucleic acid sequences encoding all enzymes of a pathway leading to the formation of n-butane. In some embodiments a recombinant microorganism as described herein is capable of producing propane. A recombinant microorganism as described herein may contain nucleic acid sequences encoding enzymes of a pathway leading to the formation of 1-butene. One or more of the enzymes of this pathway may be encoded by a heterologous nucleic acid sequence. In some embodiments two or three of the enzymes of this pathway may be encoded by a heterologous nucleic acid sequence. As noted above, a respective heterologous nucleic acid sequence may originate from a heterologous nucleic acid molecule. In some embodiments the recombinant microorganism may contain nucleic acid sequences that encode all enzymes of a pathway leading to the formation of 1-butene. In some embodiments the recombinant microorganism does not contain nucleic acid sequences encoding all enzymes of a pathway leading to the formation of 1-butene. In some embodiments a recombinant microorganism as described herein may be capable of producing 1-butene. In some embodiments a recombinant microorganism as described herein is not capable of producing 1-butene.

[0368] In some embodiments a recombinant microorganism described herein may contain nucleic acid sequences encoding enzymes of a pathway leading to the formation of isobutene. One or more of the enzymes of this pathway may be encoded by a heterologous nucleic acid sequence. In some embodiments at least two or three of the enzymes of a pathway leading to the formation of isobutene may be encoded by a heterologous nucleic acid sequence. A respective heterologous nucleic acid sequence may originate from a heterologous nucleic acid molecule. In some embodiments the recombinant microorganism may contain nucleic acid sequences that encode all enzymes of a pathway leading to the formation of isobutene. In some embodiments the recombinant microorganism does not contain nucleic acid sequences encoding all enzymes of a pathway leading to the formation of isobutene. In some embodiments a recombinant microorganism as described herein may be capable of producing isobutene. In some embodiments a recombinant microorganism as described herein is not capable of producing isobutene. A recombinant microorganism disclosed herein may also contain nucleic acid sequences encoding enzymes of a pathway leading to the formation of 1,3-butadiene. One or more of the enzymes of this pathway may be encoded by a heterologous nucleic acid sequence. In some embodiments at least two or three of the enzymes of this pathway may be encoded by a heterologous nucleic acid sequence. As indicated above, a respective heterologous nucleic acid sequence may originate from a heterologous nucleic acid molecule. In some embodiments the recombinant microorganism may contain nucleic acid sequences that encode all enzymes of a pathway leading to the formation of 1,3-butadiene. In some embodiments the recombinant microorganism does not contain nucleic acid sequences encoding all enzymes of a pathway leading to the formation of 1,3-butadiene. A recombinant microorganism as described herein may in some embodiments be capable of producing 1,3-butadiene. In some embodiments a recombinant microorganism as described herein is not capable of producing 1,3-butadiene.

[0369] A recombinant microorganism as described herein may contain nucleic acid sequences encoding enzymes of a pathway leading to the formation of n-pentane. In some embodiments the recombinant microorganism may contain nucleic acid sequences that encode all enzymes of a pathway leading to the formation of n-pentane. In some embodiments the recombinant microorganism does not contain nucleic acid sequences encoding all enzymes of a pathway leading to the formation of n-pentane. In some embodiments a recombinant microorganism as described herein is capable of producing n-pentane. A recombinant microorganism as described herein may contain nucleic acid sequences encoding enzymes of a pathway leading to the formation of 1-pentene. One or more of the enzymes of this pathway may be encoded by a heterologous nucleic acid sequence. In some embodiments at least two or three of the enzymes of this pathway may be encoded by a heterologous nucleic acid sequence. A respective heterologous nucleic acid sequence may originate from a heterologous nucleic acid molecule. In some embodiments the recombinant microorganism may contain nucleic acid sequences that encode all enzymes of a pathway leading to the formation of 1-pentene. In some embodiments the recombinant microorganism does not contain nucleic acid sequences encoding all enzymes of a pathway leading to the formation of 1-pentene. In some embodiments a recombinant microorganism as described herein may be capable of producing 1-pentene. In some embodiments a recombinant microorganism as described herein is not capable of producing 1-pentene.

[0370] In some embodiments a recombinant microorganism described herein may contain nucleic acid sequences encoding enzymes of a pathway leading to the formation of n-hexane. One or more of the enzymes of this pathway may be encoded by a heterologous nucleic acid sequence. In some embodiments the recombinant microorganism may contain nucleic acid sequences that encode all enzymes of a pathway leading to the formation of n-hexane. In some embodiments the recombinant microorganism does not contain nucleic acid sequences encoding all enzymes of a pathway leading to the formation of n-hexane. In some embodiments a recombinant microorganism as described herein is capable of producing n-hexane. A recombinant microorganism as described herein may contain nucleic acid sequences encoding enzymes of a pathway leading to the formation of 1-hexene. One or more of the enzymes of this pathway may be encoded by a heterologous nucleic acid sequence. In some embodiments at least two or three of the enzymes of this pathway may be encoded by a heterologous nucleic acid sequence. In some embodiments the recombinant microorganism may contain nucleic acid sequences that encode all enzymes of a pathway leading to the formation of 1-hexene. In some embodiments the recombinant microorganism does not contain nucleic acid sequences encoding all enzymes of a pathway leading to the formation of 1-hexene. In some embodiments a recombinant microorganism as described herein is capable of producing 1-hexene.

[0371] In some embodiments a recombinant microorganism described herein may contain nucleic acid sequences encoding enzymes of a pathway leading to the formation of isoprene, also called 2-methyl-1,3-butadiene. One or more of the enzymes of the pathway leading to the formation of isoprene may be encoded by a heterologous nucleic acid sequence. In some embodiments at least two or three of the enzymes of a pathway leading to the formation of 2-methyl-1,3-butadiene may be encoded by a heterologous nucleic acid sequence. A respective heterologous nucleic acid sequence may originate from a heterologous nucleic acid molecule. In some embodiments the recombinant microorganism may contain nucleic acid sequences that encode all enzymes of a pathway leading to the formation of 2-methyl-1,3-butadiene. The recombinant microorganism does in some embodiments not contain nucleic acid sequences encoding all enzymes of a pathway leading to the formation of 1-hexene. A recombinant microorganism as described herein may in some embodiments be capable of producing 2-methyl-1,3-butadiene. In some embodiments a recombinant microorganism as described herein is not capable of producing 2-methyl-1,3-butadiene.

[0372] The heterologous nucleic acid sequences encode one or more enzymes that allow the enzymatic conversion of acetyl-CoA to one or more alkanes and/or alkenes with a main chain of 2 to 6 carbon atoms. In some embodiments the heterologous nucleic acid sequences encode two or more enzymes that allow the enzymatic conversion of acetyl-CoA to one or more alkenes with a main chain of 2 to 5 carbon atoms. Acetyl-CoA or Acetyl coenzyme A is a thioester of acetic acid and a β-mercaptoethylamine moiety of coenzyme A. It serves as a universal component in metabolism and can be regarded as an activated carrier of an acetyl group. Acetyl-CoA is generated by the degradation of inter alia fatty acids as well as carbohydrates, and serves as a starting substance in a variety of biosynthesis pathways. Acetyl-CoA does not readily cross membranes, so that it remains within the cell and can function as a reactant.

[0373] Illustrative examples of biosynthesis pathways that may be established, completed or enhanced using the methods, nucleic acid sequences and vectors disclosed herein are depicted in the figures. In some embodiments the recombinant microorganism further expresses enzymes of the Wood-Ljungdahl-pathway. As a result the recombinant microorganism is capable of synthesizing acetyl-CoA from carbon monoxide and/or carbon dioxide. The enzymes of the Wood-Ljungdahl-pathway that the microorganism expresses may in some embodiments be encoded by and expressed from endogenous nucleic acid sequences.

[0374] A recombinant microorganism as described herein may contin a heterologous nucleic acid sequence that encodes an enzyme described in the following. The encoded protein may be any allelic variant of a respective enzyme. The respective heterologous nucleic acid sequence may in some embodiments be the nucleotide sequence found in a sequence database. The heterologous nucleic acid sequence included in the recombinant microorganism may be a homolog of a nucleic acid encoding an enzyme described below. In some embodiments the heterologous nucleic acid sequence included in the recombinant microorganism may contain a conservative modification, which essentially maintains the enzymatic activity of the peptide/protein. In same embodiments a respective conservative modification leaves the enzymatic activity of the peptide/protein essentially unchanged. A heterologous nucleic acid sequence included in the recombinant microorganism may be codon-optimized, i.e. it may have been adapted for expression in the cells of a given organism by replacing one or more, such as two or three, or a significant number, of codons with one or more codons that are more frequently used in the genes of that organism. Codon optimization is well known in the art. In general, highly expressed genes in an organism are biased towards codons that are recognized by the most abundant tRNA species in that organism. One measure of this bias is the “codon adaptation index” or “CAI”, which measures the extent to which the codons used to encode each amino acid in a particular gene are those which occur most frequently in a reference set of highly expressed genes from an organism. Many organisms display a bias for use of particular codons to code for insertion of a particular amino acid in a growing peptide chain. Codon preference or codon bias, differences in codon usage between organisms, is afforded by degeneracy of the genetic code, and is well documented among many organisms. Codon bias often correlates with the efficiency of translation of messenger RNA (mRNA), which is in turn believed to be dependent on, inter alia, the properties of the codons being translated and the availability of particular transfer RNA (tRNA) molecules. The predominance of selected tRNAs in a cell is generally a reflection of the codons used most frequently in peptide synthesis.

[0375] A heterologous nucleic acid sequence included in the recombinant microorganism may in some embodiments have a sequence identity of 90% or more when compared to the sequence of a database entry of a peptide/protein described below. In some embodiments a heterologous nucleic acid sequence in the recombinant microorganism may have a sequence identity of 95% or more, such as 97% or more, when compared to the sequence of a database entry of a peptide/protein described below. In some embodiments a heterologous nucleic acid sequence in the recombinant microorganism may have a sequence identity of 99% or more, when compared to the sequence of a database entry of a peptide/protein described below. The heterologous nucleic acid sequence in the recombinant microorganism is in some embodiments included in a double stranded nucleic acid molecule. A complementary strand to the coding strand, i.e. to the sense strand, of the heterologous nucleic acid sequence may in some embodiments be capable of binding to a strand encoding the sequence of a peptide/protein described below under stringent conditions.

[0376] In some embodiments, a recombinant microorganism as described herein is generated from a host that already contains the enzymatic capability to synthesize the respective alkane and/or alkene. In such an embodiment it can be useful to increase the synthesis or accumulation of one or more intermediate products of the pathway to, for example, drive alkane/alkene pathway reactions toward alkene production. Increased synthesis or accumulation can be accomplished by, for example, overexpression of one or more nucleic acid sequences that encode one or more of the above-described enzymes. Overexpression of the enzyme or enzymes and/or protein or proteins of an alkane or alkene pathway can occur, for example, through exogenous expression of the endogenous gene or genes, or through exogenous expression of the heterologous gene or genes. Accordingly, a naturally occurring microorganism can be readily generated to be a non-naturally occurring microorganism, for example, producing an alkane and/or alkene, through overexpression of one or more, includingall nucleic acid sequences encoding enzymes of a respective alkane/alkene pathway. In some embodiments a recombinant microorganism can be generated by mutagenesis of an endogenous gene that results in an increase in activity of an enzyme in an alkane/alkene biosynthetic pathway.

[0377] In some embodiments the recombinant microorganism contains heterologous nucleic acid sequences that encode enzymes, which allow the conversion of acetyl-CoA to ethene. In some embodiments the microorganism contains one or more heterologous nucleic acid sequences that encode the enzymes lactate CoA-transferase (EC 2.8.3.-) and lactoyl-CoA dehydratase (EC 4.2.1.54). An illustrative example of a lactoyl CoA dehydratase is the enzyme from Clostridium propionicum having an alpha subunit of SwissProt accession no. G3KIM4 (LCDA_CLOPR), version 13 of 26 Nov. 2014 (version 1 of the sequence) and a beta subunit of SwissProt accession no. Q9L3F8 (Q9L3F8_CLOPR), version 20 of 29 Oct. 2014 (version 1 of the sequence). The enzyme the enzyme lactate CoA-transferase (EC 2.8.3.-) may be an acy CoA transferase, e.g. the enzyme EC 2.8.3.1. A suitable example is the acetate CoA-transferase YdiF from Clostridium propionicum, which has a broad substrate specificity for fatty acids with up to about 4 carbon atoms, having SwissProt accession no. Q9L3F7 (Q9L3F7_CLOPR), version 38 of 1 Apr. 2015 (version 1 of the sequence).

[0378] In some embodiments the microorganism contains a heterologous nucleic acid sequence that encodes the enzyme alcohol dehydrogenase. An example of a respective enzyme is alcohol dehydrogenase from Yokenella sp. WZY002 of SwissProt accession no. W6CX26, version 10 of 1 Apr. 2015 (version 1 of the sequence), which has GenBank accession no. AHI87872.1, cf. FIG. 66.

[0379] In some embodiments the microorganism contains a heterologous nucleic acid sequence that encodes the enzyme NADP-dependent malonyl CoA reductase (EC 1.2.1.75). An example of a respective enzyme is Malonyl CoA reductase from Metallosphaera sedula of SwissProt accession no. A4YEN2, version 56 of 27 May 2015 (version 1 of the sequence). A further example is malonyl-CoA reductase from Sulfolobus tokodaii with SwissProt accession no. Q96YK1, version 79 of 27 May 2015 (version 1 of the sequence).

[0380] In some embodiments the microorganism contains a heterologous nucleic acid sequence that encodes the enzyme malonyl CoA reductase (EC 1.1.1.298). An example of such an enzyme is NADP-dependent 3-hydroxy acid dehydrogenase reductase from E. coli of SwissProt accession no. P39831, version 114 of 22 Jul. 2015 (version 1 of the sequence). A further example of such an enzyme is the malonic semialdehyde reductase RutE from Cronobacter sakazakii of SwissProt accession no. A7MFX7, version 47 of 22 Jul. 2015 (version 1 of the sequence). Another suitable enzyme is the enzyme 3-hydroxy acid dehydrogenase from E. coli of SwissProt accession no. J7R133, version 22 of 22 Jul. 2015 (version 1 of the sequence).

[0381] In some embodiments the microorganism contains a heterologous nucleic acid sequence that encodes the enzyme 3-hydroxypropionyl-CoA synthetase (EC 6.2.1.36). An illustrative example of a 3-hydroxypropionyl-CoA synthetase is the enzyme from Congregibacter litoralis of SwissProt accession no. A4A7V6, version 53 of 24 Jun. 2015 (version 1 of the sequence). A further example of a 3-hydroxypropionyl-CoA synthetase is the enzyme from Metallosphaera sedula of SwissProt accession no. A4YGR1, version 49 of 22 Jul. 2015 (version 1 of the sequence). Yet a further example of a 3-hydroxypropionyl-CoA synthetase is the enzyme from Sulfolobus tokodaii of SwissProt accession no. Q973W5, version 75 of 22 Jul. 2015 (version 1 of the sequence).

[0382] In some embodiments the microorganism contains a heterologous nucleic acid sequence that encodes the enzyme 3-hydroxypropionyl-coenzyme A dehydratase (EC 4.2.1.116). An illustrative example of a 3-hydroxypropionyl-coenzyme A dehydratase is the enzyme from Sulfolobus tokodaii of SwissProt accession no. F9VNG3, version 11 of 22 Jul. 2015 (version 1 of the sequence). Another example of a 3-hydroxypropionyl-coenzyme A dehydratase is the enzyme from Metallosphaera sedula of SwissProt accession no. A4YI89, version 52 of 22 Jul. 2015 (version 1 of the sequence). Yet a further example of a 3-hydroxypropionyl-coenzyme A dehydratase is the enzyme from Bacillus thermoamylovorans of SwissProt accession no. A0A090IWI4, version 4 of 29 Apr. 2015 (version 1 of the sequence).

[0383] In some embodiments the microorganism contains a heterologous nucleic acid sequence that encodes an acyl-CoA thioesterase enzyme (EC 3.1.2.-). The enzyme may for instance be the enzyme 1,4-dihydroxy-2-naphthoyl-CoA hydrolase of E.C. 3.1.2.28 from E. coli of SwissProt accession no. P77781, version 121 of 22 Jul. 2015 (version 1 of the sequence), which is identical to GenBank accession no. WP_000637982.1 (see FIG. 66). This enzyme has activity toward a wide range of acyl-CoA thioesters. A further example of a 1,4-dihydroxy-2-naphthoyl-CoA hydrolase of E.C. 3.1.2.28 is the enzyme from Prochlorococcus marinus of SwissProt accession no. A2BNW8, version 53 of 22 Jul. 2015 (version 1 of the sequence). As a further example, the acyl-CoA thioesterase enzyme may be the enzyme acyl-CoA thioesterase 2 of E.C. 3.1.2.2 from E. coli of SwissProt accession no. P0AGG2, version 82 of 22 Jul. 2015 (version 2 of the sequence). A further example of an acyl-CoA thioesterase enzyme of EC 3.1.2.- is the acyl-CoA thioester hydrolase YbgC from E. coli of SwissProt accession no. P0A8Z3, version 87 of 22 Jul. 2015 (version 1 of the sequence). Another example of an acyl-CoA thioesterase enzyme of EC 3.1.2.- is the acyl-CoA thioesterase YbgC (EC 3.1.2.-) from Helicobacter pylori of SwissProt accession no. P94842, version 101 of 22 Jul. 2015 (version 2 of the sequence). Yet another example of an acyl-CoA thioesterase enzyme of EC 3.1.2.- is the acyl-CoA thioesterase YneP from Bacillus subtilis of SwissProt accession no. Q45061, version 81 of 24 Jun. 2015 (version 2 of the sequence). Yet another example of an acyl-CoA thioesterase enzyme of EC 3.1.2.- is the acyl-CoA thioesterase tesB (EC 3.1.2.-) from Klebsiella pneumonia of SwissProt accession no. W9BNH2, version 15 of 22 Jul. 2015 (version 1 of the sequence).

[0384] In some embodiments the microorganism contains a heterologous nucleic acid sequence that encodes a 3-hydroxypropionyl-Co A dehydratase (EC 4.2.1.116). An illustrative example of a 3-hydroxypropionyl-Co A dehydratase is the enzyme from Metallosphaera sedula of SwissProt accession no. A4YI89 version 52 of 22 Jul. 2015 (version 1 of the sequence). Another example of a 3-hydroxypropionyl-Co A dehydratase of EC 4.2.1.116 is the acyl-CoA thioesterase YbgC from Bacillus thermoamylovorans of SwissProt accession no. A0A090IWI4, version 4 of 29 Apr. 2015 (version 1 of the sequence).

[0385] In some embodiments the microorganism contains a heterologous nucleic acid sequence that encodes the enzyme acyl-CoA thioesterase of EC 3.1.2 (EC 3.1.2.-), also called acyl-CoA thioester hydrolase. An illustrative example of an acyl-CoA thioesterase is the enzyme acyl-CoA thioesterase YneP (EC: 3.1.2.-) from Bacillus subtilis of SwissProt accession no. Q45061, version 81 of 24 Jun. 2015 (version 2 of the sequence). A further example of an acyl-CoA thioesterase is the enzyme acyl-CoA thioesterase TesB (EC: 3.1.2.-) from Haemophilus influenzae of SwissProt accession no. A0A0E3JH21, version 2 of 22 Jul. 2015 (version 1 of the sequence), which has an identical sequence to GenBank accession no. WP_{—} 005652441.1, see FIG. 66. Another example of an acyl-CoA thioesterase is the enzyme acyl-CoA thioesterase TesB (EC: 3.1.2.-) from Acinetobacter baumannii of SwissProt accession no. V5V9L9, version 17 of 22 Jul. 2015 (version 1 of the sequence). A further example of a suitable acyl-CoA thioesterase is the 1,4-dihydroxy-2-naphthoyl-CoA hydrolase enzyme (EC: 3.1.2.28) from E. coli of SwissProt accession no. C8U9Q5, version 35 of 22 Jul. 2015 (version 1 of the sequence), which has an identical sequence to GenBank accession no. WP_000637982.1, see FIG. 66. Another example of an acyl-CoA thioesterase is the enzyme acyl-CoA thioesterase TesB (EC: 3.1.2.-) from Pseudoalteromonas sp. BSi20311 of SwissProt accession no. G7EN07, version 10 of 27 May 2015 (version 1 of the sequence). A further example of an acyl-CoA thioesterase is the enzyme acyl-CoA thioesterase TesB (EC: 3.1.2.-) from E. coli of SwissProt accession no. P0AGG2, version 82 of 22 Jul. 2015 (version 2 of the sequence). Yet a further example of an acyl-CoA thioesterase is the enzyme acyl-CoA thioesterase TesA (EC: 3.1.2.-) from E. coli of SwissProt accession no. P0ADA1, version 83 of 22 Jul. 2015 (version 1 of the sequence). A further example of an acyl-CoA thioesterase is the enzyme of SwissProt accession no. A0A0E1LWS5, version 3 of 22 Jul. 2015 (version 1 of the sequence), which has an identical sequence to GenBank accession no. WP_000108160.1, cf. FIG. 66.

[0386] In some embodiments the microorganism may contain a heterologous nucleic acid sequence that encodes the enzyme phosphate butyryltransferase (EC 2.3.1.19). An example of a phosphate butyryltransferase is the enzyme phosphate butyryltransferase from Clostridium acetobutylicum of SwissProt accession no. P58255, version 78 of 22 Jul. 2015 (version 1 of the sequence), which has GenBank accession no. WP_010966357.1 (cf. FIG. 66). A further example of a phosphate butyryltransferase is the respective enzyme (EC: 2.3.1.19) from Bacillus subtilis of SwissProt accession no. P54530, version 85 of 16 Oct. 2013 (version 2 of the sequence). Yet another example is the enzyme phosphate butyryltransferase (EC 2.3.1.19) from Marinithermus hydrothermalis of SwissProt accession no. F2NPE1, version 22 of 22 Jul. 2015 (version 1 of the sequence).

[0387] In some embodiments the microorganism may contain a heterologous nucleic acid sequence that encodes the enzyme butyrate kinase (EC 2.7.2.7). An illustrative example of a butyrate kinase is the enzyme from Clostridium pasteurianum of SwissProt accession no. P81337, version 51 of 7 Jan. 2015 (version 1 of the sequence). A further example of a butyrate kinase is the enzyme from Clostridium beijerinckii of SwissProt accession no. Q05619, version 88 of 22 Jul. 2015 (version 1 of the sequence). Another example is the butyrate kinase enzyme from Thermosediminibacter oceani of SwissProt accession no. Q05619, version 31 of 22 Jul. 2015 (version 1 of the sequence).

[0388] The microorganism may in some embodiments contain a heterologous nucleic acid sequence that encodes the enzyme phenylacrylic acid decarboxylase (EC 4.1.1.-), which may also act as a phenolic acid decarboxylase. An illustrative example of a phenylacrylic acid decarboxylase is the mitochondrial enzyme from Saccharomyces cerevisiae of SwissProt accession no. P33751, version 113 of 19 Feb. 2014 (version 2 of the sequence), which is identical to GenBank accession no. NP_010827.3 (see FIG. 66). Another example of a phenylacrylic acid decarboxylase is the enzyme from Aspergillus kawachii of SwissProt accession no. G7XVA3, version 24 of 22 Jul. 2015 (version 1 of the sequence). Yet a further example of a phenylacrylic acid decarboxylase is the enzyme from Pseudoalteromonas rubra of SwissProt accession no. U1LP54, version 5 of 27 May 2015 (version 1 of the sequence). A further example of a respective enzyme, currently entitled a phenolic acid decarboxylase, is the enzyme from Bacillus subtilis of SwissProt accession no. 007006, version 93 of 24 Jun. 2015 (version 1 of the sequence), which is identical to GenBank accession no. WP_003243190.1 (see FIG. 66).

[0389] FIG. 1B depicts exemplary pathways leading to the synthesis of ethene, in which some or all of the above indicated enzymes may be present.

[0390] In some embodiments the microorganism may contain a heterologous nucleic acid sequence that encodes the enzyme 4-aminobutyrate aminotransferase (EC 2.6.1.19). An illustrative example of a 4-aminobutyrate aminotransferase is the respective enzyme from E. coli of SwissProt accession no. P22256, version 132 of 14 May 2014 (version 1 of the sequence). Another example of a 4-aminobutyrate aminotransferase is the enzyme from Thermaerobacter marianensis of SwissProt accession no. E6SLG7, version 28 of 22 Jul. 2015 (version 1 of the sequence).

[0391] In some embodiments the microorganism contains a heterologous nucleic acid sequence that encodes the enzyme glutamate dehydrogenase (EC 1.4.1.2). An illustrative example of a glutamate dehydrogenase is the enzyme from Bacillus subtilis of SwissProt accession no. P39633, version 111 of 22 Jul. 2015 (version 3 of the sequence). Another example of a glutamate dehydrogenase is the enzyme from Peptoclostridium difficile (Clostridium difficile) of SwissProt accession no. P27346, version 72 of 22 Jul. 2015 (version 1 of the sequence).

[0392] The microorganism may in some embodiments contain a heterologous nucleic acid sequence that encodes the enzyme 2-hydroxyglutarate dehydrogenase (EC 1.1.99.2). An illustrative example of a 2-hydroxyglutarate dehydrogenase is the mitochondrial enzyme Caenorhabditis elegans of SwissProt accession no. Q9N4Z0, version 84 of 22 Jul. 2015 (version 2 of the sequence). Another example of a 2-hydroxyglutarate dehydrogenase is the enzyme from Pseudomonas fluorescens of SwissProt accession no. G8Q888, version 22 of 22 Jul. 2015 (version 1 of the sequence).

[0393] In some embodiments the microorganism contains a heterologous nucleic acid sequence that encodes the enzyme glutaconate CoA-transferase (EC 2.8.3.12). An example of a respective enzyme is glutaconate CoA-transferase from Clostridium sticklandii of SwissProt accession no. E3PWJ5, version 21 of 22 Jul. 2015 (version 1 of the sequence). Another example of a glutaconate CoA-transferase is enzyme with the subunit A from Acidaminococcus fermentans of SwissProt accession no. Q59111, version 95 of 1 Apr. 2015 (version 3 of the sequence), and subunit B from Acidaminococcus fermentans of SwissProt accession no. Q59112, version 95 of 22 Jul. 2015 (version 3 of the sequence). Yet a further example is the subunit A of the enzyme from Myxococcus xanthus of SwissProt accession no. Q1D4I4, version 50 of 22 Jul. 2015 (version 1 of the sequence), which has GenBank accession no. WP_011554267.1, cf. FIG. 66. This enzyme has a subunit B of SwissProt accession no. Q1D4I3, version 46 of 22 Jul. 2015 (version 1 of the sequence), which has GenBank accession no. WP_011554268.1, cf. FIG. 66.

[0394] The microorganism may in some embodiments contain a heterologous nucleic acid sequence that encodes the enzyme 2-hydroxyglutaryl-CoA dehydratase (EC 4.2.1.-). An illustrative example of a 2-hydroxyglutaryl-CoA dehydratase is the enzyme with the subunit alpha from Acidaminococcus fermentans of SwissProt accession no. P11569, version 83 of 22 Jul. 2015 (version 3 of the sequence), and subunit beta from Acidaminococcus fermentans of SwissProt accession no. P11570, version 83 of 22 Jul. 2015 (version 3 of the sequence). Another example of a 2-hydroxyglutaryl-CoA dehydratase is the enzyme from Clostridium ljungdahlii of SwissProt accession no. D8GT18, version 19 of 22 Jul. 2015 (version 1 of the sequence).

[0395] In some embodiments the microorganism contains a heterologous nucleic acid sequence that encodes the enzyme glutaconyl-CoA decarboxylase (EC 4.1.1.70). An example of a respective enzyme is the enzyme from Acidaminococcus fermentans with the subunit alpha of SwissProt accession no. Q06700, version 82 of 1 Apr. 2015 (version 1 of the sequence), subunit beta of SwissProt accession no. Q9ZAA6, version 81 of 22 Jul. 2015 (version 1 of the sequence), subunit gamma of SwissProt accession no. Q9ZAA7, version 82 of 26 Nov. 2014 (version 1 of the sequence), and subunit delta of SwissProt accession no. Q9ZAA8, version 78 of 22 Jul. 2015 (version 1 of the sequence). Subunit delta of SwissProt accession no. Q9ZAA8 has GenBank accession no. WP_012939173.1, see FIG. 66. Another example of a glutaconyl-CoA decarboxylase is the enzyme from Rhodospirillum rubrum of SwissProt accession no. Q2RN28, version 50 of 27 May 2015 (version 1 of the sequence). Yet a further example of a glutaconyl-CoA decarboxylase is the enzyme from Clostridium phytofermentans of SwissProt accession no. A9KLQ1, version 40 of 22 Jul. 2015 (version 1 of the sequence).

[0396] The microorganism may in some embodiments contain a heterologous nucleic acid sequence that encodes the enzyme NAD-dependent 4-hydroxybutyrate dehydrogenase, also called 4-hydroxybutyrate dehydrogenase (EC 1.1.1.61). An illustrative example of a NAD-dependent 4-hydroxybutyrate dehydrogenase is the enzyme from Clostridium kluyveri of SwissProt accession no. P38945, version 72 of 22 Jul. 2015 (version 1 of the sequence). Another example of a NAD-dependent 4-hydroxybutyrate dehydrogenase is the enzyme from Acetobacterium woodii of SwissProt accession no. H6LHY2, version 16 of 22 Jul. 2015 (version 1 of the sequence).

[0397] In some embodiments the microorganism may contain a heterologous nucleic acid sequence that encodes the enzyme 4-hydroxybutyrate CoA-transferase (EC 2.8.3.-). An example of such an enzyme is Acetate CoA-transferase YdiF from E. coli of SwissProt accession no. Q8X5X6, version 81 of 22 Jul. 2015 (version 1 of the sequence). This enzyme has a broad substrate specificity for short-chain fatty acids, catalysing the reaction of propionate, acetoacetate, butyrate, isobutyrate, and 4-hydroxybutyrate. A further example of a 4-hydroxybutyrate CoA-transferase is the enzyme from Yersinia pseudotuberculosis of SwissProt accession no. A0A0E8XK97, version 2 of 22 Jul. 2015 (version 1 of the sequence). Yet another example of a 4-hydroxybutyrate CoA-transferase is the enzyme from Clostridium aminobutyricum of SwissProt accession no. Q9RM86, version 48 of 24 Jun. 2015 (version 2 of the sequence).

[0398] In some embodiments the microorganism may contain a heterologous nucleic acid sequence that encodes the enzyme vinylacetyl-CoA-Delta-isomerase (EC 5.3.3.3), which is in many embodiments also a 4-hydroxybutyryl-CoA dehydratase (EC 4.2.1.120). An example of such an enzyme with both activities is the enzyme from Clostridium aminobutyricum of SwissProt accession no. P55792, version 79 of 1 Apr. 2015 (version 3 of the sequence). Another example of a vinylacetyl-CoA-Delta-isomerase is the enzyme from Candidatus Accumulibacter sp. SK-11 of SwissProt accession no. A0A011PCK9, version 3 of 7 Jan. 2015 (version 1 of the sequence). Yet a further example of a vinylacetyl-CoA-Delta-isomerase and a 4-hydroxybutyryl-CoA dehydratase is the enzyme from Clostridium tyrobutyricum of SwissProt accession no. W6NES0, version 8 of 24 Jun. 2015 (version 1 of the sequence). Another example of a suitable enzyme with vinylacetyl-CoA delta-isomerase activity (EC 5.3.3.3) and 4-hydroxybutyryl-CoA dehydratase activity (EC 4.2.1.-) is the enzyme from Carboxydothermus hydrogenoformans of SwissProt accession no. Q3ACI6, version 67 of 22 Jul. 2015 (version 1 of the sequence). Another example of a suitable enzyme with vinylacetyl-CoA delta-isomerase activity (EC 5.3.3.3) and 4-hydroxybutyryl-CoA dehydratase activity (EC 4.2.1.-) is the enzyme from Clostridium kluyveri of SwissProt accession no. B9E5E4, version 39 of 22 Jul. 2015 (version 1 of the sequence), which has GenBank accession no. WP_012103363.1, cf. FIG. 66. An example of an enzyme that is only known to fall under EC 4.2.1.120 as a 4-hydroxybutyryl-CoA dehydratase is the enzyme from Nitrososphaera gargensis of SwissProt accession no. K0IP19, version 14 of 22 Jul. 2015 (version 1 of the sequence). A further example of an enzyme that is only known to have 4-hydroxybutyryl-CoA dehydratase activity is the enzyme from Thermoproteus tenax of SwissProt accession no. G4RJK0, version 20 of 22 Jul. 2015 (version 1 of the sequence).

[0399] In some embodiments the microorganism may contain a heterologous nucleic acid sequence that encodes the enzyme acetoacetyl-CoA thiolase or acetyl-CoA acetyltransferase (EC 2.3.1.9). An example of a respective enzyme is the enzyme from Peptoclostridium difficile (Clostridium difficile) with the SwissProt accession no. P45362, version 74 of 7 Jan. 2015 (version 2 of the sequence). Two further examples of an acetyl-CoA acetyltransferase are the enzymes from E. coli of SwissProt accession no. A0A024LB55, version 12 of 22 Jul. 2015 (version 1 of the sequence), and of SwissProt accession no. H9UUG8, version 17 of 22 Jul. 2015 (version 1 of the sequence, which includes the sequences of GenBank accession nos. AKR29896.1 and WP_000786547.1, cf. FIG. 66. Another example of a suitable acetyl-CoA acetyltransferase is the enzyme beta-ketothiolase BktB from Cupriavidus necator of SwissProt accession no. Q0KBP1, version 62 of 22 Jul. 2015 (version 1 of the sequence), which is identical to the sequences of GenBank accession no. WP_011615089.1, cf. FIG. 66. Yet a further example of an acetyl-CoA acetyltransferase is the enzyme from Bacillus thermoamylovorans of SwissProt accession no. A0A0D0F6V4, version 4 of 22 Jul. 2015 (version 1 of the sequence).

[0400] The microorganism may in some embodiments contain a heterologous nucleic acid sequence that encodes the enzyme 3-hydroxybutyryl-CoA dehydrogenase (EC 1.1.1.157). An illustrative example of a 3-hydroxybutyryl-CoA dehydrogenase is the enzyme from Clostridium acetobutylicum of SwissProt accession no. P52041, version 101 of 27 May 2015 (version 2 of the sequence). A further example of a 3-hydroxybutyryl-CoA dehydrogenase is the enzyme from Klebsiella pneumoniae of SwissProt accession no. B5XRJ5, version 52 of 22 Jul. 2015 (version 1 of the sequence). Yet another example of a 3-hydroxybutyryl-CoA dehydrogenase is the enzyme from E. coli of SwissProt accession no. B7L6B5, version 45 of 22 Jul. 2015 (version 1 of the sequence).

[0401] In some embodiments the microorganism may contain a heterologous nucleic acid sequence that encodes the enzyme 3-hydroxybutyryl-CoA dehydratase (EC 4.2.1.55). An example of a 3-hydroxybutyryl-CoA dehydratase is the enzyme from Methylobacterium extorquens with the SwissProt accession no. C5AZ74, version 34 of 29 Oct. 2014 (version 1 of the sequence). A further example is the enzyme from Peptoclostridium difficile with the SwissProt accession no. Q189Z6, version 60 of 22 Jul. 2015 (version 1 of the sequence).

[0402] In some embodiments the microorganism may contain a heterologous nucleic acid sequence that encodes the enzyme acetyl-CoA carboxylase (EC 6.4.1.2). This enzyme is typically an enzyme complex. An illustrative subunit is the beta subunit from E. coli of SwissProt accession no. W8ZLL8, version 13 of 22 Jul. 2015 (version 1 of the sequence), which corresponds to GenBank accession no. ABE08068.1 (cf. FIG. 66). Subunit alpha from E. coli of this enzyme has SwissProt accession no. W8ZDE6, version 12 of 22 Jul. 2015 (version 1 of the sequence)

[0403] In some embodiments the microorganism may contain a heterologous nucleic acid sequence that encodes the enzyme biotin carboxylase (EC 6.3.4.14). An example of a suitable biotin carboxylase is the enzyme from Shigella dysenteriae of SwissProt accession no. A0A0A7A003, version 5 of 22 Jul. 2015 (version 1 of the sequence), which corresponds to GenBank accession no. AHA67379.1 (cf. FIG. 66).

[0404] The microorganism may in some embodiments contain a heterologous nucleic acid sequence that encodes the enzyme acetoacetyl-CoA synthase (EC 2.3.1.194). An illustrative example of an acetoacetyl-CoA synthase is the enzyme from Streptomyces sp. (strain CL190) of SwissProt accession no. D7URV0, version 23 of 22 Jul. 2015 (version 1 of the sequence), which is identical to GenBank Accession no. D7URV0.1, cf. FIG. 66. Another example of an acetoacetyl-CoA synthase is the enzyme from Paenibacillus sp. P1XP2 of SwissProt accession no. A0A0B0I6S7, version 5 of 22 Jul. 2015 (version 1 of the sequence).

[0405] In some embodiments the microorganism may contain a heterologous nucleic acid sequence that encodes the enzyme acetoacetyl-CoA reductase (EC 1.1.1.36). An example of an acetoacetyl-CoA reductase is the enzyme from Acinetobacter sp. (strain RA3849) with the SwissProt accession no. P50203, version 70 of 7 Jan. 2015 (version 1 of the sequence). A further example of an acetoacetyl-CoA reductase is the enzyme from Methylobacterium extorquens with the SwissProt accession no. C5AZN8, version 41 of 22 Jul. 2015 (version 1 of the sequence). Yet another example of an acetoacetyl-CoA reductase is the enzyme from Aeromonas hydrophila with the SwissProt accession no. W0A092, version 7 of 22 Jul. 2015 (version 1 of the sequence).

[0406] The microorganism may in some embodiments contain a heterologous nucleic acid sequence that encodes an enoyl-CoA hydratase such as the enzyme (R)-specific enoyl-CoA hydratase (EC 4.2.1.119). An illustrative example of an enoyl-CoA hydratase enzyme is the enzyme from Pseudomonas putida of SwissProt accession no. Q88FM3, version 70 of 22 Jul. 2015 (version 1 of the sequence), which is identical to the enzyme of GenBank accession no. WP_003251320.1, see FIG. 66. Another example of an enoyl-CoA hydratase is the enzyme from Aeromonas hydrophila of SwissProt accession no. W0A1X1, version 9 of 22 Jul. 2015 (version 1 of the sequence), which is identical to the enzyme of GenBank accession no. WP_025327110.1, cf. FIG. 66. An example of a (R)-specific enoyl-CoA hydratase (EC 4.2.1.119) is the enzyme from Rhodospirillum rubrum of SwissProt accession no. Q2RQ36, version 59 of 24 Jun. 2015 (version 1 of the sequence). A further example of an (R)-specific enoyl-CoA hydratase (EC 4.2.1.119) is the peroxisomal enzyme from Saccharomyces cerevisiae with the SwissProt accession no. Q02207, version 123 of 27 May 2015 (version 1 of the sequence). Yet another example of an (R)-specific enoyl-CoA hydratase (EC 4.2.1.119) is the peroxisomal enzyme from Mycobacterium xenopi with the SwissProt accession no. X7YI38, version 7 of 24 Jun. 2015 (version 1 of the sequence).

[0407] FIG. 1C depicts exemplary pathways leading to the synthesis of propene, in which one or more of the above indicated enzymes may be present.

[0408] In some embodiments the microorganism may contain a heterologous nucleic acid sequence that encodes the enzyme acryloyl-coenzyme A reductase (EC 1.3.1.84), which may also be called propionyl-CoA synthase. An example of an acryloyl-coenzyme A reductase is the enzyme from Sulfolobus tokodaii with the SwissProt accession no. Q975C8, version 96 of 22 Jul. 2015 (version 1 of the sequence). Another example of an acryloyl-coenzyme A reductase is the enzyme from Rhodobacter sphaeroides with the SwissProt accession no. Q3J6K9, version 65 of 29 Apr. 2015 (version 1 of the sequence).

[0409] In some embodiments the microorganism may contain a heterologous nucleic acid sequence that encodes the enzyme methylmalonyl-CoA mutase (EC 5.4.99.2). An example of a methylmalonyl-CoA mutase is the enzyme from E. coli with the SwissProt accession no. P27253, version 124 of 22 Jul. 2015 (version 2 of the sequence). A further example of a methylmalonyl-CoA mutase is the enzyme from Streptomyces cinnamonensis with the SwissProt accession no. Q05065, version 77 of 24 Jun. 2015 (version 1 of the sequence). Another example of a methylmalonyl-CoA mutase is the enzyme from Sulfolobus islandicus with the SwissProt accession no. C3N159, version 29 of 24 Jun. 2015 (version 1 of the sequence).

[0410] The microorganism may in some embodiments contain a heterologous nucleic acid sequence that encodes the enzyme methylmalonyl-CoA decarboxylase (EC 4.1.1.41). An illustrative example of a methylmalonyl-CoA decarboxylase is the enzyme from E. coli of SwissProt accession no. P52045, version 108 of 22 Jul. 2015 (version 1 of the sequence). A further example of a methylmalonyl-CoA decarboxylase is the enzyme from Streptococcus pyogenes with the SwissProt accession no. A0A0C6FWG2, version 4 of 22 Jul. 2015 (version 1 of the sequence).

[0411] In some embodiments the microorganism may contain a heterologous nucleic acid sequence that encodes an aldehyde-alcohol dehydrogenase enzyme. Such an enzyme typically includes alcohol dehydrogenase activity (EC 1.1.1.1) and may also include acetaldehyde dehydrogenase activity (EC 1.2.1.10). An illustrative example of an aldehyde-alcohol dehydrogenase is the enzyme from Clostridium acetobutylicum of SwissProt accession no. Q7DFN2, version 24 of 27 May 2015 (version 1 of the sequence), which has GenBank accession no. WP_010890720.1 (cf. FIG. 66).

[0412] FIG. 1D depicts exemplary pathways leading to the synthesis of n-butene, in which one or more of the above indicated enzymes may be present.

[0413] In some embodiments the microorganism may contain a heterologous nucleic acid sequence that encodes the enzyme 3-hydroxy-3-methylglutaryl-CoA synthase (EC 2.3.3.10). An example of a 3-hydroxy-3-methylglutaryl-CoA synthase is the enzyme from Haloferax volcanii with the SwissProt accession no. D4GWR6, version 37 of 22 Jul. 2015 (version 1 of the sequence). An further example of a 3-hydroxy-3-methylglutaryl-CoA synthase is the enzyme from Staphylococcus aureus with the SwissProt accession no. A0A0E1XB83, version 3 of 22 Jul. 2015 (version 1 of the sequence), which is identical to GenBank accession no. WP_000172190.1. Another example of a 3-hydroxy-3-methylglutaryl-CoA synthase is the enzyme from Bacillus amyloliquefaciens Y2 with the SwissProt accession no. I2C5E4, version 18 of 22 Jul. 2015 (version 1 of the sequence).

[0414] In some embodiments the microorganism may contain a heterologous nucleic acid sequence that encodes the enzyme methylglutaconyl-CoA hydratase, also called 3-methylglutaconyl-CoA hydratase (EC 4.2.1.18). An illustrative example of a methylglutaconyl-CoA hydratase is the mitochondrial enzyme from Dictyostelium discoideum of SwissProt accession no. Q54HG7, version 67 of 22 Jul. 2015 (version 1 of the sequence). Another example of a methylglutaconyl-CoA hydratase is the enzyme from Bacillus cereus of SwissProt accession no. A0A068N7T5, version 5 of 22 Jul. 2015 (version 1 of the sequence). Yet a further example of a suitable enzyme with methylglutaconyl-CoA hydratase activity is the enzyme from Desulfatibacillum alkenivorans of SwissProt accession no. B8FC62, version 36 of 22 Jul. 2015 (version 1 of the sequence).

[0415] The microorganism may in some embodiments contain a heterologous nucleic acid sequence that encodes the enzyme methylcrotonoyl-CoA carboxylase, also called 3-methylcrotonyl-CoA carboxylase (EC 6.4.1.4). An illustrative example of a methylcrotonoyl-CoA carboxylase is the mitochondrial enzyme from Dictyostelium discoideum with an alpha subunit of SwissProt accession no. Q54KE6, version 80 of 29 May 2013 (version 1 of the sequence), and a beta subunit of SwissProt accession no. Q8T2J9, version 76 of 24 Jun. 2015 (version 2 of the sequence). Another example of a methylcrotonoyl-CoA carboxylase is the enzyme from Octadecabacter arcticus with an alpha subunit of SwissProt accession no. M9RSW8, version 14 of 22 Jul. 2015 (version 1 of the sequence), and a beta subunit of SwissProt accession no. M9RL62, version 15 of 29 Apr. 2015 (version 1 of the sequence). Yet a further example of a methylcrotonoyl-CoA carboxylase is the enzyme from Pseudomonas aeruginosa with the SwissProt accession no. Q9I299, version 91 of 24 Jun. 2015 (version 1 of the sequence), which is identical to the enzyme of GenBank accession no. WP_003113506.1, see FIG. 66. Another example of a methylcrotonoyl-CoA carboxylase is the enzyme from Pseudomonas aeruginosa with the SwissProt accession no. W1MJK9, version 8 of 22 Jul. 2015 (version 1 of the sequence), which is identical to the enzyme of GenBank accession no. WP_003100387.1, see FIG. 66.

[0416] FIG. 1E depicts exemplary pathways leading to the synthesis of isobutene, in which one or more of the above indicated enzymes may be present.

[0417] In some embodiments the microorganism may contain a heterologous nucleic acid sequence that encodes the enzyme pyruvate/2-oxobutyrate ferredoxin oxidoreductase, also called pyruvate/ketoisovalerate oxidoreductase or pyruvate synthase (EC 1.2.7.1). An illustrative example of a 2-oxobutyrate ferredoxin oxidoreductase is the pyruvate synthase enzyme from Methanosarcina barkeri with a subunit PorA of SwissProt accession no. P80521, version 83 of 22 Jul. 2015 (version 2 of the sequence), a subunit PorB of SwissProt accession no. P80522, version 81 of 22 Jul. 2015 (version 3 of the sequence), and a subunit PorC of SwissProt accession no. P80523, version 84 of 22 Jul. 2015 (version 2 of the sequence). Another example of a pyruvate/2-oxobutyrate ferredoxin oxidoreductase is the enzyme called pyruvate/ketoisovalerate oxidoreductases common subunit gamma (PorG) from Pyrococcus endeavori of SwissProt accession no. P84819, version 21 of 1 Oct. 2014 (version 1 of the sequence). Yet a further example of

[0418] In some embodiments the microorganism may contain a heterologous nucleic acid sequence that encodes the enzyme 2-oxoglutarate/butyrate ferredoxin oxidoreductase, also called 2-ketoglutarate oxidoreductase or 2-oxoglutarate synthase (EC 1.2.7.3). An illustrative example of a 2-oxoglutarate ferredoxin oxidoreductase is the pyruvate synthase enzyme from Methanocaldococcus jannaschii with a subunit KorA of SwissProt accession no. Q57724, version 88 of 24 Jun. 2015 (version 1 of the sequence), a subunit KorB of SwissProt accession no. Q57957, version 83 of 22 Jul. 2015 (version 1 of the sequence), and a subunit KorC of SwissProt accession no. Q57956, version 85 of 24 Jun. 2015 (version 1 of the sequence). Another example of a 2-oxoglutarate/butyrate ferredoxin oxidoreductase is the enzyme 2-ketoglutarate:ferredoxin oxidoreductase (KGOR) from Thermococcus sibiricus with a subunit alpha of SwissProt accession no. C6A4H7, version 32 of 27 May 2015 (version 1 of the sequence), a subunit beta of SwissProt accession no. C6A4H6, version 32 of 27 May 2015 (version 1 of the sequence), and a subunit gamma of SwissProt accession no. C6A4H5, version 31 of 27 May 2015 (version 1 of the sequence).

[0419] In some embodiments the microorganism may contain a heterologous nucleic acid sequence that encodes an aldehyde ferredoxin oxidoreductase enzyme (EC 1.2.7.5). An illustrative example of an aldehyde ferredoxin oxidoreductase is the enzyme from Clostridium autoethanogenum with the SwissProt accession no. U5RP02, version 10 of 22 Jul. 2015 (version 1 of the sequence), which has GenBank accession no. WP_013238665.1, cf. FIG. 66. The enzyme may also be the butyrate kinase from Clostridium acetobutylicum with GenBank accession no. WP_010966356.1 (cf. FIG. 66), which is completely included in the aldehyde ferredoxin oxidoreductase of SwissProt accession no. U5RP02.

[0420] In some embodiments the microorganism may contain a heterologous nucleic acid sequence that encodes the enzyme geraniol isomerase (EC 5.4.4.4), also called geraniol hydroxy-mutase. The enzyme is bifunctional and also acts as a linalool dehydratase (EC 4.2.1.127), also called linalool dehydratase-isomerase. An example of a geraniol isomerase/linalool dehydratase is the enzyme from Castellaniella defragrans with the SwissProt accession no. E1XUJ2, version 12 of 1 Apr. 2015 (version 1 of the sequence). A further example of a geraniol isomerase/linalool dehydratase is the enzyme from Colletotrichum gloeosporioides with the SwissProt accession no. L2FRH3, version 11 of 4 Mar. 2015 (version 1 of the sequence). Yet another example of a geraniol isomerase/linalool dehydratase is the enzyme from Mycobacterium triplex with the SwissProt accession no. A0A024JQR5, version 5 of 24 Jun. 2015 (version 1 of the sequence).

[0421] The microorganism may in some embodiments contain a heterologous nucleic acid sequence that encodes the enzyme trans-2-enoyl-CoA reductase, also called acetoacetyl-CoA reductase (EC1.1.1.36). An illustrative example of an acetoacetyl-CoA reductase is the enzyme from Paracoccus denitrificans with the SwissProt accession no. P50204, version 76 of 24 Jun. 2015 (version 1 of the sequence). Another example of an acetoacetyl-CoA reductase is the enzyme from Achromobacter xylosoxidans with the SwissProt accession no. E3HWI9, version 31 of 22 Jul. 2015 (version 1 of the sequence).

[0422] In some embodiments the microorganism may contain a heterologous nucleic acid sequence that encodes the enzyme butyrate kinase (EC 2.7.2.7). An example of a butyrate kinase is the enzyme butyrate kinase 1 from Clostridium acetobutylicum with the SwissProt accession no. Q45829, version 90 of 27 Mar. 2015 (version 2 of the sequence). Another example of a butyrate kinase is the enzyme butyrate kinase 2 from Clostridium acetobutylicum with the SwissProt accession no. Q97111, version 80 of 22 Jul. 2015 (version 1 of the sequence). Yet another example of a butyrate kinase is the enzyme from Thermotoga maritima with the SwissProt accession no. G4FGE0, version 34 of 22 Jul. 2015 (version 1 of the sequence).

[0423] In some embodiments the microorganism may contain a heterologous nucleic acid sequence that encodes an isoprene synthase enzyme (EC 4.2.3.27). An illustrative example of an isoprene synthase is the enzyme from Pueraria montana var lobate of SwissProt accession no. Q6EJ97, version 42 of 1 Apr. 2015 (version 1 of the sequence), which also has GenBank accession no. Q6EJ97.1, cf. FIG. 66. A further example of an isoprene synthase is the enzyme from Populus alba of SwissProt accession no. Q50L36, version 38 of 27 May 2015 (version 1 of the sequence).

[0424] In some embodiments the microorganism may contain a heterologous nucleic acid sequence that encodes a diacylglycerol kinase enzyme. An illustrative example of a diacylglycerol kinase is the enzyme from Streptococcus mutans GS-5 with the SwissProt accession no. Q05888, version 106 of 24 Jun. 2015 (version 2 of the sequence) of GenBank accession no. AAA26867, version 5 of the entry of 23 Jun. 2010 (version 2 of the sequence), cf. FIG. 66. This enzyme may for example be an undecaprenol kinase (EC 2.7.1.66), which has diacylglycerol kinase activity. An example of a respective undecaprenol kinase is the enzyme from Streptococcus mutans serotype c with the SwissProt accession no. Q05888, version 106 of 24 Jun. 2015 (version 2 of the sequence), which 98% identical to the diacylglycerol kinase of GenBank accession no. AAA26867.1.

[0425] The microorganism may in some embodiments contain a heterologous nucleic acid sequence that encodes the enzyme 2-methyl-3-buten-2-ol synthase. An illustrative example of a 2-methyl-3-buten-2-ol synthase is the enzyme from Pinus muricata of SwissProt accession no. I3QDT7, version 14 of 1 Apr. 2015 (version 1 of the sequence). Another example of a 2-methyl-3-buten-2-ol synthase is the enzyme from Pinus radiata with the SwissProt accession no. I3QDV8, version 14 of 1 Apr. 2015 (version 1 of the sequence), which has GenBank accession no. AFJ73575.1, cf. FIG. 66.

[0426] FIG. 1F depicts exemplary pathways leading to the synthesis of butadiene, in which one or more of the above indicated enzymes may be present. FIG. 1G depicts exemplary pathways leading to the synthesis of 2-methyl-1,3-butadiene, in which one or more of the above indicated enzymes may be present. FIG. 1H depicts exemplary pathways leading to the synthesis of 1-pentene, in which one or more of the above indicated enzymes may be present.

[0427] FIG. 66 depicts exemplary enzymes encoded by plasmids described below. Any of the enzymes shown in this figure may be encoded by a heterologous nucleic acid sequence included in a recombinant microorganism and expressed by the same. In some embodiments the recombinant microorganism may include one or more heterologous nucleic acid sequences expressing two or more enzymes that are shown in FIG. 66.

[0428] In some embodiments exogenous expression of the encoding nucleic acid sequence(s) is employed. Exogenous expression confers the ability to custom tailor the expression and/or regulatory elements to the host and application to achieve a desired expression level that is controlled by the user. In some embodiments endogenous expression is utilized, for instance by removing a negative regulatory effector or induction of the promoter of a gene when linked to an inducible promoter or other regulatory element. An endogenous gene having a naturally occurring inducible promoter can be up-regulated by providing the appropriate inducing agent, or the regulatory region of an endogenous gene can be engineered to incorporate an inducible regulatory element, thereby allowing the regulation of increased expression of an endogenous gene at a desired time. Similarly, an inducible promoter can be included as a regulatory element for an exogenous gene introduced into a non-naturally occurring microorganism.

[0429] For some enzymes known to have one particular activity, it has been reported that the enzyme also catalyzes a very different function. As an example, methylcrotonoyl-CoA carboxylase from Octadecabacter arcticus of SwissProt accession no. M9RSW8 has both methylcrotonoyl-CoA carboxylase activity and biotin carboxylase activity. As two further examples, methylglutaconyl-CoA hydratase from Desulfatibacillum alkenivorans of SwissProt accession no. B8FC62 has both methylglutaconyl-CoA hydratase activity and enoyl-CoA isomerase activity, and methylmalonyl-CoA decarboxylase from Streptococcus pyogenes with the SwissProt accession no. A0A0C6FWG2 has methylmalonyl-CoA decarboxylase activity, enoyl-CoA isomerase activity and enoyl-CoA hydratase activity. On the other hand, enzymes can also be modified using directed evolution to broaden their specificity towards non-natural substrates. Alternatively, the substrate preference of an enzyme can also be changed using directed evolution. Thereby a given enzyme can be engineered for efficient function on a natural, for example, improved efficiency, or a non-natural substrate, for example, increased efficiency. In this regard, algorithms have been used to design a retro-aldolase that could be used to catalyze the carbon-carbon bond cleavage in a non-natural and non-biological substrate, 4-hydroxy-4-(6-methoxy-2-naphthyl)-2-butanone (Jiang, L., et al., Science (2008) 319, 1387-1391). These algorithms used different combinations of four different catalytic motifs to design a new enzyme. Twenty of the selected designs for experimental characterization had four-fold improved rates compared to the uncatalyzed reaction (Jiang et al., 2008, supra). In this way not only the array of potential substrates that can be used by an enzyme can be changed, but the design and construction of an enzyme can also be performed. As an example, a method of DNA shuffling (random chimeragenesis on transient templates or RACHITT) was reported to lead to an engineered monooxygenase that had an improved rate of desulfurization on complex substrates as well as 20-fold faster conversion of a non-natural substrate (Coco, W M, et al., Nat. Biotechnol. (2001) 19, 4, 354-359). Similarly, the specific activity of a sluggish mutant triosephosphate isomerase enzyme was improved up to 19-fold from 1.3 fold (Hermes, J D, et al., Proc. Nat. Acad. Sci U.S.A. (1990) 87, 2, 696-700). This enhancement in specific activity was accomplished by using random mutagenesis over the whole length of the protein and the improvement could be traced back to mutations in six amino acid residues.

[0430] As noted above, the recombinant microorganism may contain the endogenous enzymes of the Wood-Ljungdahl pathway. The recombinant microorganism may have been engineered on the basis of a naturally occurring microorganism as the host that already included functional endogenous enzymes of the Wood-Ljungdahl pathway. The Wood-Ljungdahl pathway, also called the reductive acetyl-CoA pathway, is an enzymatic reaction path that allows the conversion of CO and/or CO₂ to acetyl-CoA. This pathway is indicated in any of FIG. 1B to FIG. 1F. Where CO₂ is used as the reactant, one molecule of CO₂ is reduced to CO via the enzyme carbon monoxide (CO) dehydrogenase/acetyl-CoA synthase. Another molecule of CO₂ is reduced to create a carbonyl group. The recombinant microorganism may be an acetogen, i.e. an obligately anaerobic bacterium, in which the reductive acetyl-CoA or Wood-Ljungdahl pathway serves as the bacterium's main mechanism for energy conservation. With CO₂ as the substrate, in an acetogenic bacterium molecular hydrogen is typically required for the formation of acetyl-CoA. A respective microorganism is thus capable of utilizing CO and syngas as well as generally also of utilizing CO₂ and CO₂/H₂ mixtures.

### Obtaining a Recombinant Microorganism

[0431] A number of prokaryotes are suitable for use in obtaining a recombinant microorganism as described herein, such as gram-negative bacteria. In some embodiments the microorganism used is a bacterium that can ferment one carbon reactants such as carbon monoxide or carbon dioxide. Suitable species may be in a genus of Acetobacterium, Acetohalobium, Acetoanaerobium, Acetitomaculum, Acetonema, Alkalibaculum, Anoxybacillus, Ammonifex, Archaeoglobus, Bacillus, Blautia, Bradyrhizobium, Bryanella, Butyribacterium, Caloramator, Calderihabitans, Caloribacterium, Caldanaerobacter, Candidatus, Carbophilus, Carboxydobrachium, Carboxydocella, Carboxydothermus, Cloacibacillus, Clostridium, Desulfomonile, Desulfovirgula, Holophaga, Eubacterium, Desulfitbacterium, Desulfotomaculum, Desulfurispora, Desulfosporosinus, Dehalococcoides, Desulfatibacillum, Desulfobacterium, Desulfobacula, Desulfospira, Desulfovermiculus, Desulfovibrio, Dictyoglomus, Hydrogenophilus, Hydrogenophaga, Moorella, Methanobrevibacter, Mycobacterium, Natroniella, Natronincola, Oligotropha, Oxobacter, Orenia, Paenibacillus, Peptostreptococcus, Pseudomonas, Ralstonia, Rhodopseudomonas, Rhodospirillum, Rubrivivax, Ruminococcus, Scalindua, Syntrophococcus, Streptomyces, Sporomusa, Thermoanaerobacter, Thermincola, Thermoacetogenium, Thermosinus, Tindallia, Thermosediminibacter, Treponema, Thermolithobacter, Thermococcus, Thermofilum or Thermoproteus. Typically, a strain selected for development as an alkane/alkene production strain is first analysed to determine which alkene production genes are endogenous to the strain and which genes are not present. Genes for which an endogenous counterpart is not present in the strain are assembled in one or more recombinant constructs, which are then transformed into the strain in order to supply the missing function(s). Genes for which an endogenous counterpart is present in the strain can, if desired, be modified or supplemented with one or more recombinant genes, for example in order to enhance flux through particular pathways or particular steps.

[0432] In some embodiments, the recombinant microorganism is a cell that is derived from a naturally occurring carboxidotrophic cell. The respective host cell may thus be carboxidotrophic. In some embodiments, the recombinant cell is derived from a naturally occurring thermotolerant host cell. The respective host cell may thus be thermotolerant. Thermotolerant host cells are useful in process applications in biotechnology due to their ability to grow at relatively high temperatures. In some embodiments the host cell may be thermophilic, i.e. a cell that thrives at a temperature of about 45° C. or higher. In some embodiments the host cell may be mesophilic, i.e. a cell that thrives in the range from about 20 to about 45° C.

[0433] A large number of well-established techniques of genetic engineering are available in the art that can be employed in order to obtain a microorganism as disclosed herein. Such techniques include molecular methods such as heterologous gene expression, genome insertion or deletion, altered gene expression, inactivation of genes, or enzyme engineering methods.

[0434] In a method disclosed herein a nucleic acid molecule may be introduced into a host cells by any suitable technique of nucleic acid delivery for transformation of a cell available in the art. Examples of suitable techniques include, but are not limited to, direct delivery of DNA, e.g. via transfection, injection, including microinjection, electroporation, calcium phosphate precipitation, by using DEAE-dextran followed by polyethylene glycol, direct sonic loading, liposome mediated transfection, receptor-mediated transfection, microprojectile bombardment, agitation with silicon carbide fibers, Agrobacterium-mediated transformation, desiccation/inhibition-mediated DNA uptake or any combination thereof

[0435] An exogenous nucleic acid molecule may be delivered to a microorganism as a naked nucleic acid molecule or it may be formulated with one or more agents to facilitate the transformation process. As an illustrative example, a liposome-conjugated nucleic acid may be provided. A microorganism as described herein may be obtained by introducing one or more exogenous nucleic acids into a microorganism. A variety of techniques of introducing a nucleic acid molecule into a cell are available in the art. For example, transformation, including transduction or transfection, may be achieved by electroporation, ultrasonication, polyethylene glycol-mediated transformation, chemical or natural competence, protoplast transformation, prophage induction or conjugation.

[0436] Electroporation has been described for several carboxydotrophic acetogens as C. ljungdahlii (Köpke et al., Poc. Nat. Acad. Sci. U.S.A. (2010) 107, 13087-13092; WO 2012/053905; Leang et al., Appl Environ Microbiol. (2013) 79, 4, 1102-1109), C. autoethanogenum (WO 2012/053905), Acetobacterium woodii (Straetz et al., Appl. Environ. Microbiol. (1994) 60, 1033-37) or Moorella thermoacetica (Kita et al., J Biosci Bioeng. (2013) 115, 4, 347-352) and is a standard method used in many Clostridia such as C. acetobutylicum (Mermelstein et al., Biotechnology (1992) 10, 190-195), C. cellulolyticum (Jennert et al., 2000, Microbiology, 146, 3071-3080) or C. thermocellum (Tyurin et al., Appl. Environ. Microbiol. (2004) 70, 883-890). Conjugation has been described as method of choice for many Clostridia including Clostridium difficile (Herbert et al., FEMS Microbiol. Lett. (2003) 229, 103-110) or C. acetobuylicum (Williams et al., J. Gen. Microbiol. (1990) 136, 819-826) and could be used in a similar fashion for carboxydotrophic acetogens.

[0437] In certain embodiments, due to the restriction systems which are active in the microorganism to be transformed, it is necessary to methylate the nucleic acid to be introduced into the microorganism. This can be done using a variety of techniques known in the art.

### Vectors and Gene Integration

[0438] A microorganism described herein may in some embodiments be a bacterium. In some embodiments a bacterium as described herein may contain a bacterial chromosome and an additional nucleic acid molecule. The additional nucleic acid molecule may have been introduced as described above. In some embodiments a bacterium as described herein contains a bacterial chromosome and no additional nucleic acid molecule. The bacterial chromosome may in some embodiments be modified and contain an exogenous nucleic acid sequence as described herein. The exogenous nucleic acid sequence may be a heterologous nucleic acid sequence. In one embodiment the bacterial chromosome contains exogenous, including a heterologous, nucleic acid sequence as described herein, and does not contain an additional nucleic acid molecule.

[0439] A microorganism described herein may in some embodiments contain two or more heterologous nucleic acid sequences encoding an enzyme as described herein. A microorganism described herein may in some embodiments contain three or more heterologous nucleic acid sequences encoding an enzyme as described herein. A microorganism described herein may also contain a heterologous nucleic acid sequence encoding two or more enzymes as described herein. A microorganism described herein may also contain a heterologous nucleic acid sequence encoding three or more enzymes as described herein.

[0440] In some embodiments a nucleic acid molecule as disclosed herein includes an expression cassette capable of inducing and/or regulating the expression of an enzyme. In some embodiments a nucleic acid molecule as disclosed herein is encompassed by a vector that contains a promoter effective to initiate transcription in the respective host cell (whether of endogenous or exogenous origin).

[0441] Expression of an enzyme in a microorganism may include the generation of a vector that has a construct with a sequence encoding the respective enzyme. A vast number of suitable vectors are known that can be employed. Once the vector or nucleic acid molecule that contains the construct(s) has been prepared for expression, the nucleic acid construct(s) may be introduced into a selected suitable host cell by any of a variety of suitable means, i.e., transformation, transfection, conjugation, protoplast fusion, electroporation, particle gun technology, calcium phosphate-precipitation, direct microinjection, and the like. In some embodiments, the vector contains a selective marker. Examples of selectable markers include, but are not limited to, antibiotic resistance nucleic acids (e.g., kanamycin, ampicillin, carbenicillin, gentamicin, hygromycin, phleomycin, bleomycin, neomycin, or chloramphenicol) and/or nucleic acids that confer a metabolic advantage, such as a nutritional advantage on the host cell. In such embodiments after the introduction of the vector, recipient cells can be grown in a selective medium, which selects for the growth of vector-containing microorganism. Expression of the cloned gene(s) results in the production of the respective enzyme. This can take place in the transformed cells as such, or following the induction of these cells to differentiate. A variety of incubation conditions can be used to form a peptide as disclosed herein. In some embodiments it may be desired to use conditions that mimic physiological conditions.

[0442] Generating a microorganism as described herein may involve the use of various recombinant nucleic acid constructs such as cloning vectors, expression vectors or synthetic operons. Both cloning and expression vectors contain nucleotide sequences that allow the vectors to replicate in one or more suitable recombinant microorganisms. In a cloning vector, this sequence is generally one that enables the vector to replicate independently of the recombinant microorganism chromosomes and also includes either origins of replication or autonomously replicating sequences. Various bacterial and viral origins of replication are in use in the art. Generally, any vector suitable to maintain, propagate or express polynucleotides to express a polypeptide in a recombinant microorganism can be used for expression in this regard. To name a few examples, chromosomal, episomal and virus-derived vectors, including vectors derived from bacterial plasmids, bacteriophages, yeast episomes, yeast chromosomal elements, viruses, such as baculoviruses, papoviruses, such as SV40, vaccinia viruses, adenoviruses, fowl pox viruses, pseudorabies viruses and retroviruses, and vectors derived from combinations thereof, such as those derived from plasmid and bacteriophage genetic elements, such as cosmids and phagemids, are used in the art.

[0443] The appropriate DNA sequence is inserted into the respective vector by any of a variety of well-known and routine techniques. In general, a DNA sequence for expression is joined to an expression vector by cleaving the DNA sequence and the expression vector with one or more restriction endonucleases and then joining the restriction fragments together using e.g. T4-DNA ligase. Linking is achieved by conventional techniques such as SOE PCR, DNA synthesis, blunt end ligation, or ligation at restriction enzyme sites. If suitable restriction sites are not available, synthetic oligonucleotide adapters or linkers can be used. The assembly of multiple sequences, including large numbers of genes, into a single nucleic acid molecule can be achieved by in vitro recombination using the combination of an exonuclease, a polymerase immobilized DNA polymerase, as described by Gibson et al. (Gibson, D. G., et al. Nature Methods (2009) 6, 5, 343-345; incorporated herein by reference in its entirety).

[0444] Numerous promoters are functional in bacterial cells and have been described in the literature, including constitutive, inducible, developmentally regulated, and environmentally regulated promoters. Of particular interest is the use of promoters (also referred to as transcriptional initiation regions) that are functional in the appropriate microbial recombinant microorganism. For example, if E. coli is used as a recombinant microorganism, then exemplary promoters that can be used include, but are not limited to, the phage lambda PL promoter, the E. coli lac, trp and tac promoters, the SV40 early and late promoters, promoters of retroviral LTRs or the CaMV 35S promoter.

[0445] A polynucleotide sequence encoding one or more enzymes described herein also can be part of an expression cassette that at a minimum includes a promoter, one or more nucleic acids encoding an enzyme disclosed herein, and a transcriptional termination signal sequence functional in a recombinant microorganism. The promoter can be any types of promoter as desired. For example, an inducible promoter or constitutive promoter and the expression cassette can further include an operably linked targeting sequence or transit or secretion peptide coding region capable of directing transport of the protein produced. The expression cassette can also further include a nucleotide sequence encoding a selectable marker.

[0446] In some embodiments a shuttle vector is used, which is capable of propagating in two or more different host species. Exemplary shuttle vectors are able to replicate in E. coli and/or Bacillus subtilis and in an obligate anaerobe, such as Clostridium. Upon insertion of an enzyme into the shuttle vector, the shuttle vector can be introduced into an E. coli host cell for amplification and selection of the vector. Such shuttle vector, e.g., a shuttle vector containing one or more sequences that encode enzymes, may also be introduced into a host cell that contains methyltransferase (e.g., an E. coli host cell expressing a methyltransferase) for the purpose of obtaining a methylated vector.

[0447] The vector can then be isolated and introduced into a selected microorganism for expression of the one or more enzymes. Any suitable shuttle vector or plasmid may be used, such as any of the shuttle plasmids described in the present disclosure below.

[0448] In some embodiments any of the cells described herein are introduced with a single vector, e.g., a shuttle plasmid DNA molecule, harbouring one or more nucleic acid sequences encoding an enzyme. A dual plasmid system may also be used. Two different plasmids carrying one or more sequences encoding an enzyme may be used. Each of the two different plasmids may carry a different selection marker. In some embodiments, the plasmid(s) are stably transformed in anaerobic cells.

[0449] For the production of an alkane and/or alkene it may be desirable to use a recombinant microorganism in which the heterologous nucleic acid sequence is stably maintained. In this regard a replicative plasmid may be used. This is a plasmid that has an origin of replication that is recognized by the host and that allows the plasmid to replicate as a stable, autonomous, extrachromosomal element that is partitioned during cell division into daughter cells.

[0450] In some embodiments one or more sequences encoding one or more enzymes are being integrated into the genome of a selected microorganism. Integration may be performed together with an expression cassette. In some embodiments integration into a host genome is a stable integration. Integration of a nucleic acid into a genome can be carried out using a transposase enzyme. The respective host genome may be a bacterial chromosome.

[0451] In embodiments where one or more nucleic acid sequences encoding an enzyme are being integrated into a host genome, one or more transposable elements may be used for this purpose. As an example, a class 2 transposable element, which may encode a transposase, may be included in a vector and encompass one or more coding sequences that encode one or more enzymes as disclosed herein. Transposases from a variety of organisms, ranging from bacteria to humans, are known. An example of a human transposase is the transposase THAP9, which contains a THAP-type zinc finger. Most transposases are classified under EC number EC 2.7.7.

[0452] A frequently used and well-examined transposase is the transposase of the transposon Tn10, which is found in bacteria such as E. coli. The transposon contains five genes, including the transposase and two proteins that confer resistance to the antibiotic tetracycline. The transposase of Tn10 is for example included in the plasmid pWH1(A31V)-mRFP or the plasmid pXT107. A further example of a suitable transposase is the transposase of the bacterial transposon Tn5 (EC:3.1.-.-), found in E. coli and Shewanella. The transposon encodes two proteins, the transposase Tn5 and a transposition inhibitor. Transposase Tn5 is a member of the RNase superfamily of proteins which includes retroviral integrases. The transposon codes for antibiotic resistance to kanamycin and other aminoglycoside antibiotics. The transposase Tn5 is for example included in the plasmid pO86A1. Yet a further example is the Tn3 transposase of the Tn3 transposon, found in prokaryotes. The transposon encodes β-lactamase, an enzyme that confers resistance to β-lactam antibiotics, the Tn3 transposase and Tn3 resolvase. Another example of a transposase that may be used is a Tc1/mariner-type transposase such as the Sleeping Beauty transposon system. The sleeping Beauty transposon system is a synthetic DNA transposon designed to introduce precisely defined DNA sequences into the chromosomes of vertebrates. It contains the Sleeping Beauty (SB) transposase. A large number of SB transposons have been developed as non-viral vectors, in particular for introduction of genes into genomes of vertebrate animals. Two further transposon-based systems that may be employed are the Frog Prince transposon/transposase system described in e.g. international patent application WO 2003/100070, or the TTAA-specific transposon piggyBac system. Yet a further example is the transposase of the transposon TniA from E. coli. The transposase of TniA is included in the plasmids pEC279, pEC54 and peH4H. A further example, the transposon Tn1000 transposase, also called “Transposase for transposon gamma-delta”, found in E. coli, is included e.g. in the E. coli F Plasmid. As further examples may serve the IS186A transposase, the REP-associated tyrosine transposase or the InsH transposase from E. coli.

[0453] Integration into a host genome may be performed in combination with positive selection, for example by providing a nucleic acid molecule that encodes a particular property or function that is required for survival of the recombinant host, e.g. bacteria, depends upon the presence or absence of a particular function encoded by the DNA that is introduced into the organism. The respective property or function may reside in resistance against a particular antibiotic, see also above. As an illustrative example, a resistance marker may be expressed and thus active when integrated in the host genome, e.g. chromosomal DNA, so that positive selection for host cells that carry the integrated nucleic acid, also called “integrand”, can be carried out. In some embodiments the respective resistance marker may not be expressed and thus active when encompassed by a vector and thus not yet integrated into a genome. The respective vector, e.g. plasmid, may include a repressor capable of binding in close proximity to the promoter of the antibiotic resistance gene. As a result, while included in the vector, the resistance marker is inactive. Once inserted into a bacterial genome, e.g. via transposition, the operator sequence to which the repressor is capable to bind is not present. The resistance marker is therefore functional in the host genome.

### Determining the Expression of an Enzyme

[0454] Where desired, the expression of a protein may be verified by detecting the amount of a nucleic acid or a protein or, in the case of an enzyme, by detecting the enzymatic activity. Any available method can be used to detect the presence of a nucleic acid or a protein in the context of a method disclosed herein. Such a method may include established standard procedures well known in the art. Examples of such techniques include, but are not limited to, RT-PCR, RNAse protection assay, Northern analysis, Western analysis, ELISA, radioimmunoassay or fluorescence titration assay. For an enzyme, the enzymatic activity may be used to assess the presence and to estimate the amount of protein present. A respective activity test may be carried out in vivo in the cell using a dye, where a dye is available that can be introduced into the cell.

[0455] Detection of a respective dye may be carried out using Fluorescence Microscopy, including Ratio Fluorescence Microscopy. Integrated optical imaging systems are commercially available that are capable of processing an entire assay from the biological preparation to the final data. Sensitive fluorescent indicators of a variety of physiologically important properties are available, and fluorescent reagents can be used for sensitively and specifically characterizing the intracellular distribution of proteins, nucleotides, ions, and lipids. In ratio fluorescence microscopy two fluorescence images are collected and the parameter of interest is quantified as a ratio of the fluorescence in one image to that in the other image. Fluorescence ratio images may be collected by sequentially exciting the sample with two different wavelengths of light and sequentially collecting two different images, by exciting the sample with a single wavelength of light and collecting images formed from light of two different emission wavelengths, or by exciting the sample with two wavelengths and collecting emissions of two wavelengths.

[0456] Assessing the amount of a protein in a cell may include assessing the amount of a nucleic acid, e.g. RNA, in a cell encoding the respective protein. A method as disclosed herein may further include measuring the expression of a sequence that encodes the sequence of GenBank accession no. WP_003113506.1 or a homolog thereof and/or a sequence of GenBank accession no. NP_010827.3 or a homolog thereof. This can for instance be achieved by determining the number of RNA molecules transcribed from an encoding nucleic acid molecule that is under the control of a selected promoter. A method commonly used in the art is the subsequent copy of RNA to cDNA using reverse transcriptase and the coupling of the cDNA molecules to a fluorescent dye. The analysis may for example be performed in form of a DNA microarray. Numerous respective services and kits are commercially available, for instance GeneChip® expression arrays from Affymetrix. Other means of determining gene expression of a transcription factor include, but are not limited to, oligonucleotide arrays, and quantitative Real-time Polymerase Chain Reaction (RT-PCR).

[0457] A nucleic acid probe may be used to probe a sample by any common hybridization method to detect the amount of nucleic acid molecules of the protein. In order to obtain nucleic acid probes chemical synthesis can be carried out. The synthesized nucleic acid probes may be first used as primers in a polymerase chain reaction (PCR) carried out in accordance with recognized PCR techniques, essentially according to standard PCR protocols utilizing the appropriate template, in order to obtain the respective probe. One skilled in the art will readily be able to design such a probe based on the sequences available for the biomarker. The hybridization probe can be labeled by standard labeling techniques such as with a radiolabel, enzyme label, fluorescent label, biotin-avidin label, chemiluminescence or a nanoparticle. After hybridization, the probes may be visualized using a standard technique.

[0458] The most frequently used methods for determining the concentration of nucleic acids include the detection by autoradiography, fluorescence, chemiluminescence or bioluminescence as well as electrochemical and electrical techniques. A further suitable technique is the electrical detection of a target nucleic acid molecule as disclosed in international patent applications WO 2009/041917 and WO 2008/097190, both being incorporated herein by reference in their entirety. In case of conflict, the present specification, including definitions, will control. A technique for the specific detection of a selected nucleic acid well established in the art is based on the hybridisation between a nucleic acid binding partner and a target nucleic acid. Typically the respective nucleic acid binding partner is immobilised onto a solid support, and subsequently one of the above mentioned detection methods is employed.

[0459] In some embodiments determining the level of expression of the gene of interest includes determining the level of transcription into mRNA. RNA encoding the protein of interest may be amplified using any available amplification technique, such as polymerase chain reaction (PCR), including multiplex PCR, nested PCR and amplification refractory mutation specific (ARMS) PCR (also called allele-specific PCR (AS-PCR), rolling circle amplification (RCA), nucleic acid sequence based amplification (NASBA), ligase chain reaction (LCR), QB replicase chain reaction, loop-mediated isothermal amplification (LAMP), transcription mediated amplification (TMA) and strand displacement amplification (SDA), including genome strand displacement amplification (WGSDA), multiple strand displacement amplification (MSDA), and gene specific strand displacement amplification (GS-MSDA). Detection of the obtained amplification products may be performed in numerous ways known in the art. Examples include, but are not limited to, electrophoretic methods such as agarose gel electrophoresis in combination with a staining such as ethidium bromide staining. In other embodiments a method as disclosed herein is accompanied by real time detection, such as real time PCR. In these embodiments the time course of the amplification process is monitored. A means of real time detection commonly used in the art involves the addition of a dye before the amplification process. An example of such a dye is the fluorescence dye SYBR Green, which emits a fluorescence signal only when bound to double-stranded nucleic acids.

[0460] As an illustrative example, real-time PCR may be used to determine the level of RNA encoding the protein of interest, such as an enzyme. Such a PCR procedure is carried out under real time detection, so that the time course of the amplification process is monitored. PCR is characterised by a logarithmic amplification of the target sequences. For the amplification of RNA, a reverse transcriptase-PCR is used. Design of the primers and probes required to detect expression of a protein is within the skill of a practitioner of ordinary skill in the art. In some embodiments RNA from the sample is isolated under RNAse free conditions and then converted to DNA via the use of a reverse transcriptase. Reverse transcription may be performed prior to RT-PCR analysis or simultaneously, within a single reaction vessel. RT-PCR probes are oligonucleotides that have a fluorescent moiety, also called reporter dye, attached to the 5′ end and a quencher moiety coupled to the 3′ end (or vice versa). These probes are typically designed to hybridize to an internal region of a PCR product. In the unhybridized state, the proximity of the fluor and the quench molecules prevents the detection of fluorescent signal from the probe. During PCR amplification, when the polymerase replicates a template on which an RT-PCR probe is bound, the 5′-3′ nuclease activity of the polymerase cleaves the probe. Thereby the fluorescent and quenching moieties are decoupled. Fluorescence increases then in each cycle, in a manner proportional to the amount of probe cleavage. Fluorescence signal emitted from the reaction can be measured or followed over time using equipment which is commercially available using routine and conventional techniques. Quantitation of biomarker RNA in a sample being evaluated may be performed by comparison of the amplification signal to that of one or more standard curves where known quantities of RNA were evaluated in a similar manner In some embodiments, the difference in biomarker expression is measured as the difference in PCR cycle time to reach a threshold fluorescence, or “dCT.”

### Producing Alkenes Using a Recombinant Microorganism

[0461] Using a recombinant microorganism as described herein, one or more alkene and/or alkane products may be produced. The production of one or more alkenes and/or alkanes may involve providing a substrate that can be converted into acetyl-CoA by the respective microorganism. As explained above, acetyl-CoA is a central metabolic building stone. A large variety of substrates, depending on the microorganism used, may potentially be suitable. In some embodiments the production may involve providing a substrate that includes CO. In some embodiments a substrate may be provided that includes CO₂. The substrate may be gaseous and contain a certain amount of CO and/or CO₂. A substrate may for example be provided that contains 25% (v/v) or more of carbon monoxide. A substrate may also be provided that contains 25% (v/v) or more of carbon dioxide. In some embodiments a substrate may for be provided that contains 35% (v/v) or more of carbon monoxide. A substrate may in some embodiments be provided that contains 35% (v/v) or more of carbon dioxide. CO may be a component that is included syngas, also called synthesis gas, a gaseous mixture essentially consisting of hydrogen and carbon monoxide. In some embodiments both CO and CO₂ may be included in syngas.

[0462] A method of producing an alkane and/or alkene as disclosed herein generally involves culturing the non-natural microorganism under suitable conditions in a suitable medium in the presence of CO and/or CO₂, for instance under an atmosphere that contains CO and CO₂. In some embodiments culturing a non-natural microorganism described herein may be carried out in substantially anaerobic culture conditions. The culture medium may contain vitamins and minerals sufficient to permit growth of the micro-organism used. Anaerobic media suitable for fermentation using CO are known in the art.

[0463] Producing one or more alkenes and/or alkanes may include a fermentation process. The fermentation process may be carried out in an aqueous culture medium, for example in a bioreactor. Culture in a bioreactor using culture media is a well-established technique in the art. Carbon monoxide and/or carbondioxide, including a substrate containing the same, as well as media, may be fed to a respective bioreactor in a continuous, batch or batch fed fashion.

[0464] The produced alkane or alkene may be secreted into the surrounding medium by the recombinant microorganism. The alkane or alkene may thus be recovered from the fermentation broth. In embodiments where the alkane or alkene is gaseous, a portion of the alkane or alkene may dissolve in the culture medium. As an example, butadiene has a solubility in water of about 7.4 g/L. Butene has a solubility in water of about 2.2/L, while propene has a solubility in water of about 0.6 g/L. Where the alkane or alkene is gaseous, typically the respective product is collected from the gas phase above the culture medium.

[0465] The produced alkane or alkene may be isolated and enriched, including purified, using any suitable separation and/or purification technique known in the art. In some embodiments the produced alkane or alkene is gaseous, such as n-butene or 1,3-butadiene. In some embodiments the produced alkane or alkene is a liquid such as isoprene. In case of a gaseous product the alkane or alkene may pass a filter, a gas separation membrane and/or a gas purifier such as an absorbent column, and then be stored in one or more cylinders. In some embodiments distillation may be employed to purify a product gas. Gas-liquid extraction (stripping) may in some embodiments be employed. In case of a liquid product isolation of the alkane or alkene may include centrifugation. The product may also be enriched via extraction using an organic phase. A respective organic phase containing the alkane and/or alkene may be separated from the fermentation liquid by adding a deemulsifier and/or a nucleating agent into the fermentation liquid. Illustrative examples of a deemulsifier include flocculants and coagulants. Illustrative examples of a nucleating agent include droplets of the acetyl-CoA derived compound itself and organic solvents such as dodecane, isopropyl myristrate, and methyl oleate. In some embodiments, an organic phase comprising the acetyl-CoA derived compound separates from the fermentation spontaneously. Methods of purifying the obtained alkane or alkene may also involve other standard techniques such as ultrafiltration, and one or more chromatographic techniques.

[0466] The listing or discussion of a previously published document in this specification should not necessarily be taken as an acknowledgement that the document is part of the state of the art or is common general knowledge.

[0467] The invention illustratively described herein may suitably be practiced in the absence of any element or elements, limitation or limitations, not specifically disclosed herein. Additionally, the terms and expressions employed herein have been used as terms of description and not of limitation, and there is no intention in the use of such terms and expressions of excluding any equivalents of the features shown and described or portions thereof, but it is recognized that various modifications are possible within the scope of the invention claimed. Thus, it should be understood that although the present invention has been specifically disclosed by exemplary embodiments and optional features, modification and variation of the inventions embodied therein herein disclosed may be resorted to by those skilled in the art, and that such modifications and variations are considered to be within the scope of this invention.

[0468] The invention has been described broadly and generically herein. Each of the narrower species and subgeneric groupings falling within the generic disclosure also form part of the invention. This includes the generic description of the invention with a proviso or negative limitation removing any subject matter from the genus, regardless of whether or not the excised material is specifically recited herein.

[0469] Other embodiments are within the appending claims. In addition, where features or aspects of the invention are described in terms of Markush groups, those skilled in the art will recognize that the invention is also thereby described in terms of any individual member or subgroup of members of the Markush group.

[0470] In order that the invention may be readily understood and put into practical effect, particular embodiments will now be described by way of the following non-limiting examples.

### EXAMPLES

[0471] The examples illustrate techniques that can be used in methods disclosed herein and in obtaining a recombinant microorganism as described above.

### Example 1: Production of Methane, Ethane, Ethene, Propane, Propene, n-butane, 1-butene, 2-methylpropene, n-pentane, 1-pentene, n-hexane and 1-hexene

[0472] The construction of the expression plasmid SG323 (and all other plasmids described herein) was (were) performed by standard recombinant DNA and molecular cloning techniques using genes from Azotobacter vinelandii CA. FIG. 4D shows the plasmid SG323 (SEQ ID No: 4) which contains an engineered molybdenum nitrogenase pathway. This plasmid was electroporated into Clostridium Ijungdahlii cells by the following protocol:

### Genetic Transformation of Clostridium ljungdahlii Cells

[0473] Preparation of electrocompetent C. ljungdahlii cells: The procedure for making C. ljungdahlii electro competent cells was modified from a protocol reported previously (Kopke, M., al. Proc Natl Acad Sci USA. (2010) 107, 29, 13087-13092). All manipulations except centrifugation were carried out on ice in an anaerobic chamber. All buffers and centrifuge tubes were made ice cold and anoxic before use. All plastic ware was placed in the anaerobic chamber at least 24 h before use in order to eliminate any residual oxygen. Competent cells were maintained in SMP buffer (270 mM sucrose, 1 mM MgCl₂, 7 mM sodium phosphate, pH 6) with 10% DMSO at −80° C. until use. Electrocompetent C. ljungdahlii cells were prepared from cultures that were freshly inoculated from frozen stocks and then transferred twice in YTF liquid medium. About 15 to 16 h before preparation of competent cells, a mid- to late-log-phase culture was transferred into two serum bottles containing 100 mL fresh YTF medium supplemented with 40 mM DL-threonine (final optical density at 600 nm [OD₅₀₀]=0.004). After overnight growth at 37° C., early-log phase cells (OD₆₀₀=0.2 to 0.3; 200 mL) were harvested by centrifugation at 10,000 rpm for 10 min at 4° C. The cells were washed twice with 200 ml of SMP wash buffer and resuspended in the same buffer at a final concentration of 10¹⁰ to 10¹¹ cells/mL. Antifreezing buffer (60% DMSO—40% SMP, pH 6) was added to the competent cells a tone-fifth of the final resuspension volume to achieve a final concentration of 10% DMSO. The resulting competent cells (25 μL/tube) were stored at −80° C. for future use. The competence of these frozen competent cells remained stable for about 1 month.

[0474] Electrotransformation procedures for C. ljungdahlii: All procedures were carried out in an anaerobic chamber. Electrocompetent C. ljungdahlii cells (25 μl) were quickly transferred on ice from a −80° C. freezer to an anaerobic chamber. After thawing on ice (about 1 min), the cells were mixed with 1 to 5 μg DNA and transferred to a prechilled, 0.1-cm-gap cuvette. Cells were pulsed at 0.625 kV with resistance at 600 Ohm and a capacitance of 25 μF by using a microbial electroporation system. Immediately after the pulse, cells were recovered with 0.5 mL of fresh YTF medium, transferred to a pressure tube containing 10 mL of YTF medium supplemented with 5 mM L-cysteine (pH 7), and incubated at 37° C. The electroporated cells were allowed to recover at 37° C. until their cell densities were higher than immediately after the electroporation (about 9 to 12 h). Five-milliliter volumes of the outgrowth cultures or appropriately diluted cultures were mixed with 20 mL of YTF molten agar (1.5%) containing an appropriate antibiotic and poured into a petri dish. After the agar mixtures were solidified, plates were incubated upside down. After 2-3 days colonies became visible and could be inoculated in liquid culture.

[0475] YTF Medium:

[0476] 10 g/L yeast extract

[0477] 16 g/L Bacto tryptone

[0478] 4 g/L sodium chloride

[0479] 5 g/L fructose

[0480] Supplemented with 2 mM L-cysteine

[0481] The final pH is 6.0.

[0482] Methane, ethane, ethene, propane, propene, n-butane, 1-butene, 2-methylpropene, n-pentane, 1-pentene, n-hexane and 1-hexene production from syngas (mixture of CO, CO₂, and H₂) and electrons by gas fermentation with electron supply by electrode was performed using said genetically engineered C. ljungdahlii cells harboring the plasmid SG323. The materials and methods used are described in the following:

[0483] Used Medium for Growth with Gas:

| | | |
|---|---|---|
| NH₄Cl: | 1.0 | g |
| KCl: | 0.1 | g |
| MgSO₄ × 7H₂O | 0.2 | g |
| NaCl | 0.8 | g |
| KH₂PO₄ | 0.1 | g |
| CaCl₂ × 2H₂O | 20.0 | mg |
| Trace Elements (see below) | 10.0 | mL |
| Wolfe's Vitamin Solution (see below) | 10.0 | mL |
| Reducing Agent (see below) | 10.0 | mL |
| Distilled water | 980.0 | mL |

The final pH is 6.0.

[0484] Trace Elements:

| | | |
|---|---|---|
| Nitrilotriacetic acid | 2.0 | g |
| MnSO₄ × H₂O | 1.0 | g |
| Fe(SO₄)₂(NH₄)₂ × 6H₂O | 0.8 | g |
| CoCl₂ × 6H₂O | 0.2 | g |
| ZnSO₄ × 7H₂O | 0.2 | mg |
| CuCl₂ × 2H₂O | 20.0 | mg |
| NiCl₂ × 6H₂O | 20.0 | mg |
| Na₂MoO₄ × 2H₂O | 20.0 | mg |
| Na₂SeO₄ | 20.0 | mg |
| Na₂WO₄ | 20.0 | mg |
| Distilled water | 1.0 | L |

Add nitrilotriacetic acid to water and adjust to pH 6.0 with KOH. Add remainder of ingredients.

[0485] Wolfe's Vitamin Solution:

| | | |
|---|---|---|
| Biotin | 2.0 | mg |
| Folic acid | 2.0 | mg |
| Pyridoxine hydrochloride | 10.0 | mg |
| Thiamine × HCl | 5.0 | mg |
| Riboflavin | 5.0 | mg |
| Nicotinic acid | 5.0 | mg |
| Calcium D-(+)-pantothenate | 5.0 | mg |
| Vitamin B12 | 0.1 | mg |
| p-Aminobenzoic acid | 5.0 | mg |
| Thioctic acid | 5.0 | mg |
| Distilled water | 1.0 | L. |

[0486] Reducing Agent:

| | |
|---|---|
| L-Cysteine (free base) | 4.0 g |
| Distilled water | 100.0 mL. |

Used gas: 60% CO, 10% CO₂, 30% H₂.

[0487] The transformed cells were cultivated in the medium above supplied the 10 μg/mL thiamphenicol (antibiotic) at 37° C. in CSTR bioreactor provided with syngas (60% CO, 10% CO₂, 30% H₂) at 1 bar pressure and an electrode with power supply for electricity supply. Gene expression was induced by 10 mM IPTG when a cell density of 0.3 OD₆₀₀ was reached. Product analysis was performed by GC-MS (Shimadzu GC-MS QP5050A). Headspace gas sampling was conducted using a 500 iL Hamilton gastight syringe. Methane, ethane, ethene, propane, propene, n-butane, 1-butene, 2-methylpropene, n-pentane, 1-pentene, n-hexane and 1-hexene production could be detected by GC-MS.

### Alternative Embodiments

[0488] Plasmid SG193 (FIG. 4A and SEQ ID NO: 1), Plasmid SG211 (FIG. 4B and SEQ ID NO: 2) and Plasmid SG278 (FIG. 4C and SEQ ID NO: 3) were also used to engineer Clostridium ljungdahlii as well as Clostridium autoethanogenum cells to produce methane, ethane, ethene, propane, propene, n-butane, 1-butene, 2-methylpropene, n-pentane, 1-pentene, n-hexane. The same basic protocol and process like described in the preferred embodiment was performed. Different substrates were used as listed in the following:

[0489] For all substrates used, also those of the subsequent working examples:

[0490] 60% CO, 10% CO₂, 30% H₂

[0491] 100% CO

[0492] 30% CO₂ and 60% H2

[0493] 60% CO, 10% CO₂, 30% H2 and electrons

[0494] 100% CO and electrons

[0495] 100% CO₂ and electrons

[0496] 30% CO₂ and 60% H₂ and electrons

### Example 2: Positive Selection of Chromosomal Integrations and Multicopy Chromosomal Integrations in Clostridia Via Transposase

[0497] The following example illustrates a method of integrating heterologous DNA (metabolic gene clusters or any other functional or non-functional nucleic acid sequence) into a giving host or chassis microorganism. Positive selection (or direct genetic selection) of mutant bacteria is possible whenever survival of the recombinant bacteria depends upon the presence or absence of a particular function encoded by the DNA that is introduced into the organism. The advantage of a selection method over a screening method is that growth of bacteria with the specific desired mutation is greatly favored over bacteria lacking that specific mutation, thus facilitating the identification of the preferred mutants. Since all functions that are required for transposition such as the transposase and the integration cassette flanked by the recognized base sequences for transposition, are introduced on plasmids, direct positive selection via an antibiotic selection marker as part of the integration cassette is not possible. The resistance marker is functional on the plasmid and therefor (most plasmids also have high copy numbers) no growth advantage arises from an integration event. However, when the marker is only expressed and thus active when integrated in the chromosomal DNA, positive selection for integrands is possible.

[0498] FIG. 2A provides an overview of the basic system for integration of a nucleic acid sequence into a bacterial chromosome by a cut and paste transposase 20. All functions necessary are located on a single plasmid. A backbone antibiotic resistance marker 32 and an origin of replication 30 for propagation of the vector in the transformed bacterial cell. The integration cassette is flanked by transposase recognition sites 22 and 28; the integration cassette also comprises a second antibiotic resistance gene. The transposase 20 cuts the DNA at the two recognition sites and integrates this nucleic acid sequence into the bacterial chromosome.

[0499] The expression of the resistance marker is deactivated when located on the plasmid by a repressor binding in close proximity to the promoter of antibiotic gene. After transposition the operator sequence the repressor binds to is gone and resistance is conferred. This principle is shown in more detail in FIG. 2B.

[0500] FIG. 3A depicts a positive selection system implemented on top of the minimal system of FIG. 2A. Here an additional repressor 32 binds to the operator site 34, blocking expression of an antibiotic resistance gene 38. The corresponding antibiotic resistance protein is not expressed and no resistance is conferred. FIG. 3B illustrates the situation where the cassette has been integrated into the bacterial chromosome 44 by action of the transposase. The operator site 34 is no longer present, and expression of the antibiotic resistance gene 38 leads to antibiotic resistance. Thus it is possible to select for insertional chromosomal mutants.

[0501] The 5′ITR (inverted terminal repeat recognized and cut by the transposase) and the lox66 site are also a promoter for the erythromycin/clarythromycin antibiotic resistance marker mlsR, cf. FIG. 2B. The repressor (lacI) binds to the lac operator sequence and blocks transcription (this can also be reversed by the addition of IPTG). After transposition the lac operator sequence is gone and mlsR is expressed and can be selected for (RBS=ribosome binding site). Surprisingly, the respective process also facilitates the generation of multicopy integrations and the transposition of high cargo. Both positive selection of integrands and a prolonged timeframe for transposition events to take place can be achieved.

### Initial System for Random Chromosomal Integration in Clostridia Via Transposase

[0502] The chromosomal integration of a anaerobic fluorescence protein (BsFbFP) was established by testing four different E. coli-clostridial shuttle plasmids harboring everything necessary for transposition (integration cassette with antibiotic resistance marker and BsFbFP flanked by the recognized base sequences for transposition also called inverted terminal repeats and a transposase under control of an xylose inducible promoter) and a negative control which consists of only a E. coli-clostridial shuttle plasmid with no additional functions. The wild type transposase himar1 and also a hyperactive variant himar1 C9 were tested. For genetic transformation of Clostridium acetobutylicum the plasmids are methylated in vivo by the plasmid pANT. The vectors used are of SEQ ID NOs: 9 to 14. Their vector maps can be taken from FIG. 9 to FIG. 14.

[0503] Transformation of Clostridium acetobutylicum was performed according to the following protocol:

[0504] 1. Methylation of Plasmid DNA
[0505] Transformation of plasmids in E. coli XL1 Blue MR together with plasmid pANT (Φ3T methyltransferase)
[0506] plates with antibiotics: ampicillin, chloramphenicol and tetracycline
[0507] Midipreperation (concentration of DNA should be not too low).

[0508] 2. 5 ml Starter Liquid Culture C. acetobutylicum with 2×YTG Medium

[0509] In the evening 50 ml 2×YTG medium inoculated with 50-2001 pre-culture and cultured at 36° C. over night.
[0510] Harvest cells at OD₆₀₀=0.8-1
[0511] Centrifuge cells at 2200 g for 10 min (4° C.)
[0512] Wash the cells with 40 ml ice cold HEB⁺ buffer
[0513] Centrifugation at 2200×g for 10 min (4° C.)
[0514] Washing of cells with HEB+ buffer three times
[0515] Suspend in 2 ml HEB buffer; aliquot to 600 μL (one transformation)
[0516] Use cold 4 mm electroporation cuvette and up to 4 μL plasmid (600 μL cells)
[0517] Incubate for 2 min on ice
[0518] Electroporation at 2500 V
[0519] Addition of 1.4 mL 2×YTG medium and incubation at 36° C. for 4 hours
[0520] Plate on selection plates with appropriate antibiotics e.g. clarythromycin (Cla) or thiamphenicol (Tm)
[0521] Incubate for 3 days at 36° C.
[0522] Observe colonies and inoculate liquid culture

[0523] 3. Medium:
[0524] 2×YTG: 5 g/L glucose
[0525] 16 g/L tryptone
[0526] 10 g/L yeast extract 5 g/L NaCl
[0527] pH 7.0
[0528] HEB⁺ buffer:
[0529] 7 mM HEPES
[0530] 272 mM sucrose
[0531] 5 mM MgCl₂
[0532] pH 7.4
[0533] HEB buffer contains no MgCl₂
[0534] Concentrations of the used, methylated plasmids:
   [0535] pANT methylated plasmid BG00132: 350 ng/μL
   [0536] pANT methylated plasmid BG00133: 300 ng/μL
   [0537] pANT methylated plasmid BG00134: 280 ng/μL
   [0538] pANT methylated plasmid BG00135: 385 ng/μL
   [0539] pANT methylated plasmid BG00136: 500 ng/μL

[0540] Electroporation of all constructs was successful and 10 to 50 colonies on each plate were observed.

[0541] Integration was performed as follows:

[0542] 4 colonies of each transformation (1,2,3,4,5) were inoculate in fresh medium (5 mL) as follows:
[0543] Medium 1=2×YTG 5 g/L glucose
[0544] Medium 2=2×YTGX 5 g/L glucose+2.5 g/L xylose
[0545] Medium 3=2×YTG 5 g/L glucose+10 g/L xylose.

[0546] Observation: pre cultures with plasmids BG132, BG134 BG135 have been grown faster than the others.

[0547] 2 μL of each pre culture were plated on 2×YT plates containing
[0548] 5 g/L glucose
[0549] 5 g/L glucose with 2.5 g/L xylose—10 g/L xylose

[0550] 22 distinct colonies were struck out on the following plates (1st round):
[0551] 1. 2×YTG plates
[0552] 2. 2×YTGX with 5 g/L glucose and 2.5 g/L xylose
[0553] 3. 2×YTX with 10 g/L xylose

[0554] 22 colonies were struck out as follows (2nd round):
[0555] 1. 2×YTG plates
[0556] 2. 2×YTGX with 5 g/L glucose and 2.5 g/L xylose
[0557] 3. 2×YTX with 10 g/L xylose

[0558] 22 colonies taken from the plates were struck out as follows (3rd round):
[0559] 1. 2×YTG plates
[0560] 2. 2×YTGX with 5 g/L glucose and 2.5 g/L xylose
[0561] 3. 2×YTX with 10 g/L xylose

[0562] 22 colonies taken from the plates were struck out as follows (4th round):
[0563] 1. 2×YTG plates without antibiotics
[0564] 2. 2×YTG plates with 10 μg/mL clarythromycin (Cla)
[0565] 3. 2×YTG plates with 20 μg/mL thiamphenicol (Tm)

[0566] Plates of round 4 were examined:

| Integrand | plate | clone | medium | vector |
|---|---|---|---|---|
| 1 | t2_X27B_9 | 1 | 2xYTX with 10 g/L | BG133 |
| | | | xylose | |
| 2 | t2_X27B_9 | 2 | 2xYTX with 10 g/L | BG133 |
| | | | xylose | |
| 3 | t2_X27B_2 | 1 | 2xYTX with 10 g/L | BG133 |
| | | | xylose | |
| 4 | t2_X27B_2 | 2 | 2xYTX with 10 g/L | BG133 |
| | | | xylose | |
| 5 | t4_X19B | 17 | 2xYTX with 10 g/L | BG135 |
| | | | xylose | |
| 6 | t2_GX19B | 5 | 2xYTGX with glucose | BG133 |
| | | | and 2, 5 g/L xylose | |
| 7 | t2_GX19B_4 | 1 | 2xYTGX with glucose | BG133 |
| | | | and 2, 5 g/L xylose | |
| 8 | t2_GX19B_4 | 2 | 2xYTGX with glucose | BG133 |
| | | | and 2, 5 g/L xylose | |
| 9 | t2_GX4.5B_21 | 1 | 2xYTGX with glucose | BG133 |
| | | | and 2, 5 g/L xylose | |
| 10 | t2_GX4.5B_21 | 2 | 2xYTGX with glucose | BG133 |
| | | | and 2, 5 g/L xylose | |
| 11 | t2_GX4.5B_21 | 3 | 2xYTGX with glucose | BG133 |
| | | | and 2, 5 g/L xylose | |
| 12 | t2_X4.5B | 9 | 2xYTX with 10 g/L | BG133 |
| | | | xylose | |

[0567] Summary; integrands could be isolated, the controls were all negative, but very few integrands compared to the huge number of tested clones. A number of clones still had not lost the plasmid.

[0568] Determination of the Loci of Integration was Performed as Follows:

[0569] Preparation of genomic DNA of the Clostridium acetobutylicum integration strains (see table) using a kit from Macherey-Nagel (special protocol for difficult to lyse bacteria) approx. 20 mL liquid culture was used. Concentration of gDNA was determined by nanodrop.
[0570] Integrand 1=470 ng/μL
[0571] Integrand 2=460 ng/μL
[0572] Integrand 3=520 ng/μL
[0573] Integrand 4=710 ng/μL
[0574] Integrand 5=380 ng/μL
[0575] Integrand 6=460 ng/μL
[0576] Integrand 7=440 ng/μL
[0577] Integrand 8=450 ng/μL
[0578] Integrand 9=420 ng/μL
[0579] Integrand 10=400 ng/μL
[0580] Integrand 11=570 ng/μL
[0581] Integrand 12=370 ng/μL

[0582] The samples were sent to LGC Genomics GmbH (Berlin, Germany) to perform PCR walking for loci determination.

[0583] Additionally PCR was Performed to Verify the Integrands:

[0584] Polymerase Chain Reaction (PCR) Integration Check

[0585] PCR 1: Test Presence of Fluorescence Protein BsFBFP
[0586] Template: genomic DNA of integrands (Clostridium acetobutylicum) and wild type gDNA, positive control vector BG132

(SEQ ID NO: 58)

| | |
|---|---|
| Primer BG272 forward: | GCACTTCCTCTTGTTGGAAAT |

(SEQ ID NO: 59)

| | |
|---|---|
| Primer BG273 reverse: | ACTTGTGCAAGTCCACTTAAA |

[0587] PCR 2: Check Integration Marker
[0588] Template: genomic DNA of integrands (Clostridium acetobutylicum) and wild type gDNA, positive control vector BG132

(SEQ ID NO: 60)

| | |
|---|---|
| Primer BG274 forward: | CTATGTGGCGCGGTATTATC |

(SEQ ID NO: 61)

| | |
|---|---|
| BG275 reverse: | GCATTTAAGCGTCAGAGCATGG |

[0589] PCR 3: Check Integration Marker 2
[0590] Template: genomic DNA of integrands (Clostridium acetobutylicum) and wild type gDNA, positive control vector BG132

(SEQ ID NO: 62)

| | |
|---|---|
| Primer BG276 forward: | TTTAATCGTGGAATACGGGTTTG |

(SEQ ID NO: 63)

| | |
|---|---|
| Primer BG277 reverse: | GTGAGCTATTCACTTTAGGTTTAGG |

[0591] PCR 4: Check Backbone
[0592] Template: genomic DNA of integrands (Clostridium acetobutylicum) and wild type gDNA, positive control vector BG132

| (SEQ ID NO: 64) | |
|---|---|
| Primer BG278 forward: | CAAAAGGCCAGGAACCGTAA |
| (SEQ ID NO: 65) | |
| Primer BG279 reverse: | GCGTCAGACCCCGTAGAAAA |

[0593] PCR 5: Check Backbone 2
[0594] Template: genomic DNA of integrands (Clostridium acetobutylicum) and wild type gDNA, positive control vector BG132

(SEQ ID NO: 66)

| | |
|---|---|
| Primer BG280 forward: | ATTGTAAACCGCCATTCAGAG |

(SEQ ID NO: 67)

| | |
|---|---|
| Primer BG281 reverse: | ATACCGTTGCGTATCACTTTC |

[0595] PCR 1-5 were performed with 30 cycles, 1 min elongation, 55° C. annealing temperature, 50 μL total size, phusion polymerase. The PCR products were then examined by 0.8% analytic DNA agarose gel electrophoresis. The results are depicted in FIGS. 15A and 15B.

[0596] Gel 1, FIG. 15A: loading of 10 μL each; allocation; name; result were as follows:
[0597] Lane 1: 3 μL ladder 1 kB purchased from Roth (Carl Roth GmbH & CO. KG, Karlsruhe, Germany)
[0598] Lane 2-6: integrand 1 PCR 1-5; result: 1 and 3 positive 2,4,5 negative
[0599] Lane 7-11: integrand 2 PCR 1-5; result: 1 and 3 positive 2,4,5 negative
[0600] Lane 12: 3 μL ladder 100 bp purchased from Roth
[0601] Lane 13-17: integrand 3 PCR 1-5; 1 and 3 positive 2,4,5 negative
[0602] Lane 18-22: integrand 4 PCR 1-5; 1 and 3 positive 2,4,5 negative
[0603] Lane 23-27: integrand 5 PCR 1-5; 1 and 3 positive 2,4,5 negative
[0604] Lane 28: 3 μL ladder 1 kB purchased from Roth

[0605] Gel 2, FIG. 15B: loading of 10 μL each; allocation; name; result were as follows:
[0606] Lane 1: 3 μL ladder 1 kB purchased from Roth
[0607] Lane 2-6: integrand 6 PCR 1-5; result: 1 and 3 positive 2,4,5 negative
[0608] Lane 7-11: integrand 7 PCR 1-5; result: 1 and 3 positive 2,4,5 negative
[0609] Lane 12-16: integrand 8 PCR 1-5; 1 and 3 positive 2,4,5 negative
[0610] Lane 17: 3 μL ladder 100 bp purchased from Roth
[0611] Lane 18-22: wild type PCR 1-5; all negative
[0612] Lane 23-27: integrand 5 PCR 1-5; 1,3,4,5 positive 2 negative
[0613] Lane 28: 3 μL ladder 1 kB purchased from Roth

[0614] Genome walking—first results from LGC Genomics. The reads (first number corresponds to the integrand vide supra) can be taken from SEQ ID NOs: 68 to 78.

[0615] Table with Initial Analysis:

| integrand | name | locus 1 | nomenclature | locus 2 | Nomencl. | locus 3 |
|---|---|---|---|---|---|---|
| 1 | t2_X27B_{—} | Predicted Fe—S oxidoreductase, | CA_C1838 | | | |
| | | YMCB B. subtilis ortholog | | | | |
| 2 | t2_X27B_9 | Predicted Fe—S oxidoreductase, | CA_C1838 | — | | |
| | | YMCB B. subtilis ortholog | | | | |
| 3 | t2_X27B_{—} | | | | | |
| 4 | t2_X27B_2 | | | | | |
| 5 | t4_X19B | Uracyl DNA glycosilase | CA_C219 | — | | |
| 6 | t2_GX19B | | | | | |
| 7 | t2_GX19B | Predicted Fe—S oxidoreductase, | | — | | |
| | | YMCB B. subtilis ortholog | | | | |
| 8 | t2_GX19B_4 | | | vor | CA_C3587 | Beta |
| | | | | DnaD | | glucosidase |
| 9 | t2_GX4.5B_21 | Predicted Fe—S oxidoreductase, | | — | | |
| | | YMCB B. subtilis ortholog | | | | |
| 10 | t2_GX4.5B_21 | Predicted Fe—S oxidoreductase, | | vor | CA_C3587 | |
| | | YMCB B. subtilis ortholog | | DnaD | | |
| 11 | t2_GX4.5B_21 | Predicted Fe—S oxidoreductase, | | — | | |
| | | YMCB B. subtilis ortholog | | | | |
| 12 | t2_X4.5B | Predicted Fe—S oxidoreductase, | CA_C1838 | | | |
| | | YMCB B. subtilis ortholog | | | | |

[0616] Result: PCR genome walking performed by lgc genomics was successful but not all loci could be determined. Lgc performed a second run with optimized setup.

[0617] Fluorescence Microscopy of Integrands

[0618] Integrands were analysed on a Leica fluorescence microscope. Images of Clostridium acetobutylicum Integrand 1 are shown in FIGS. 16A, 16B and 16C, magnification is 1000×. An image of Clostridium acetobutylicum Integrand 2 is shown in FIG. 16D. Images of Clostridium acetobutylicum Integrand 10 are shown in FIGS. 16E, 16F and 16G. An image of a Clostridium acetobutylicum wild type control is shown in FIG. 16H. All examined integrands show fluorescence. The wild type control is negative.

[0619] Genome walking—the second round of PCR Genome walking by LGC Genomics gave reads that can be taken from SEQ ID NOs: 79 to 85.

### Example 3: Development of a Positive Selection System for Random Chromosomal and Random Multicopy Chromosomal Integrations in Clostridia Via Transposase

[0620] To further improve the initial, laborious chromosomal integration system a new plasmid with a repressor blocking transcription of the integration marker was constructed. Subsequently, to test the new system, the following E. coli-Clostridium acetobutylicum shuttle vectors were transformed into Clostridium acetobutylicum. To transform the plasmids into Clostridium acetobutylicum it was first methylated in vivo with the help of plasmid pANT as described above. To achieve this, the plasmids were transformed into E. coli XL1-Blue cells (see above). Vector BG133 (abbreviated “N”) the best performing vector from Example 2, vide supra, had the sequence of SEQ ID NO: 11. Vector BG168 (abbreviated “I”, cf. FIG. 17) had the sequence of SEQ ID NO: 15. The temperature-sensitive plasmid BG182 (cf. FIG. 18) had the sequence of SEQ ID NO: 16. After plasmid preparation Clostridium acetobutylicum can be genetically transformed with e.g. plasmid BG168 by the above protocol: C. acetobutylicum was cultivated anaerobically in 2×YTG medium (16 g/L tryptone, 10 g/L yeast extract, 5 g/L NaCL, 5 g/L Glucose) until an optical density of 0.6 to 0.8 is reached. All following steps were also conducted anaerobically. The cells were centrifuged for 10 min at 2000 g (4° C.) and subsequently washed with electroporation buffer (7 mM Hepes, 270 mM sucrose, 5 mM MgCl₂, pH 7.4). This was repeated another two times. Then, a cold electroporation cuvette was prepared with 5 kg plasmid DNA, 500 μL competent cells and electroporated at 2500V for more than 3 ms. After 2 hours of regeneration with fresh 2×YTG medium the cells were plated on 2×YTG agar plates supplemented with suitable antibiotics. After 2 days genetically transformed colonies became visible. The chromosomal integrands were isolated via the positive selection system: cells were cultivated with addition of xylose for transposase induction and with addition of the second antibiotic. After two serial transfers cells were plated again and then picked for individual testing. Integrands were identified by loss of resistance for the first (backbone) maker which is thiamphenicol while remaining resistant for the second (integration) marker clarithromycin. More than 100 integrands could be isolated. Only a fraction was further analyzed. Preparation of genomic DNA of the Clostridium acetobutylicum integration strains was performed using a kit from Macherey-Nagel (special protocol for difficult to lyse bacteria); approx. 20 mL liquid culture was used.

[0621] Comparison of Chromosomal Integration by Serial Transfer (Positive Selection)

[0622] Serial Transfer Scheme:

| Name | | (μg/mL) | | |
|---|---|---|---|---|
| N(I)C5V#Ü# | 5 Vks (2xYTX medium) | Cla 5 | Transfer: | 3 times |
| | 7 mL | | 5 μL | |
| N(I)C20V#Ü# | 5 Vks (2xYTX medium) | Cla 20 | Transfer: | 3 times |
| | 7 mL | | 5 μL | |
| N(I)C100V#Ü# | 5 Vks (2xYTX medium) | Cla 100 | Transfer: | 3 times |
| | 7 mL | | 5 μL | |

[0623] Legend:
[0624] N=plasmid N (vide supra)
[0625] I=plasmid I (vide supra)
[0626] V=liquid culture (replicate) 7 mL size
[0627] Ü=round of serial transfer
[0628] #=number
[0629] Cla=clarythromycin

[0630] Isolation of Integrands:

[0631] After serial transfer in liquid culture 5 μL of each replicate was plated on 2×YTG. 28 colonies were then struck out on the following plates:
[0632] 1. 2×YTG without antibiotics
[0633] 2. 2×YTG with 5 μg/mL clarythromycin
[0634] 3. 2×YTG with 20 μg/mL thiamphenicol
   When the plates were compared all clones from the “N” series showed thiamphenicol resistance (backbone marker) meaning that plasmid is still there. However, all clones from the “I” series were only clarythromycin resistant (integration marker) but not thiamphenicol resistant (backbone marker) meaning they are all chromosomal integrands.

[0635] The results are summarized in the table shown in FIG. 62.

[0636] Subsequently gDNA was prepared as depicted in FIG. 63 (protocol vide supra).

[0637] Determination of Loci:

[0638] The first round of PCR genome walking by LGC Genomics provided the following results:

[0639] Not determinable:

[0640] 6, 8, 10, 11, 12, 13, 14, 15, 17, 18, 20, 21, 22, 23, 24, 25, 26, 27, 28, 29, 32, 35

[0641] guent01: 4-hydroxy-3-methylbut-2-enyl diphosphate reductase/S1 RNA-binding domain protein

[0642] 1, 2, 3, 4, 5

[0643] guent07: pploop-atpase

[0644] 7, 9

[0645] guent16: Conserved membrane protein, probable transporter, YPAA B. subtilis ortholog

[0646] 16

[0647] guent19: Uncharacterised protein, DegV family

[0648] 19

[0649] guent30: fibronectin type III domain-containing protein

[0650] 30, 31

[0651] guent34: Staphylococcus aureus subsp. aureus ST228 plasmid pI5S5

[0652] 34

[0653] The obtained reads were as follows: >guent_07_gw2 bk_261112.0.10 had the sequence of SEQ ID NO: 86; >guent01.gw2 bk_261112.0.2 had the sequence of SEQ ID NO: 87; >guent_19_gw2 bk_261112.0.15 had the sequence of SEQ ID NO: 88; >guent_30_gw2 bk_261112.0.18 had the sequence of SEQ ID NO: 89; >guent_34_gw2 bk_261112.0.21 had the sequence of SEQ ID NO: 90; >guent_16_gw2 bk_261112.0.14 had the sequence of SEQ ID NO: 91.

[0654] A second round of loci determination provided the results depicted in FIG. 64. Almost all loci were determined. The results are also very consistent. One out of the 4 clones generated with the highest selection pressure shows multicopy integration.

### Example 4: Application of the Positive Selection System for Random Chromosomal and Random Multicopy Chromosomal Integrations Via Transposase in Clostridium ljungdahlii and Clostridium autoethanogenum

[0655] The following plasmids with the same positive selection system as depicted in example 2 (vide supra) were used with Clostridium ljungdahlii and Clostridium autoethanogenum: Vector BG282 (FIG. 19) with the sequence of SEQ ID NO: 17; vector BG281 (FIG. 20) with the sequence of SEQ ID NO: 18; vector BG287 (FIG. 21) with the sequence of SEQ ID NO: 19; vector BG288 (FIG. 22) with the sequence of SEQ ID NO: 20; vector BG289 (FIG. 23) with the sequence of SEQ ID NO: 21; vector BG290 (FIG. 24) with the sequence of SEQ ID NO: 22; vector BG291 (FIG. 25) with the sequence of SEQ ID NO: 23; vector BG292 (FIG. 26) with the sequence of SEQ ID NO: 24; vector BG178 (FIG. 27) with the sequence of SEQ ID NO: 25. Plasmid BG281 was for example used to integrate a big mevalonate biosynthetic gene cluster in the chromosome of Clostridium ljungdahlii. Plasmid BG282, as another example, was used to integrate a slightly different MVA pathway into the chromosome of Clostridium autoethanogenum.

### Genetic Transformation of Clostridium ljungdahlii

[0656] The transformation was performed according to Leang, L., et al., Appl Environ Microbiol. (2013) 79, 4, 1102-1109. Instead of NEB express cells E. coli BL21, and YTF medium instead of PETC medium was used. The protocol was as follows:

[0657] Preparation of Electrocompetent C. ljungdahlii Cells.

[0658] All manipulations except centrifugation were carried out on ice in an anaerobic chamber. All buffers and centrifuge tubes were made ice cold and anoxic before use. All plastic ware was placed in the anaerobic chamber at least 24 h before use in order to eliminate any residual oxygen. Competent cells were maintained in SMP buffer (270 mM sucrose, 1 mM MgCl₂, 7 mM sodium phosphate, pH 6) with 10% DMSO at 80° C. until use. Electro competent C. ljungdahlii cells were prepared from cultures that were freshly inoculated from frozen stocks and then transferred twice in PETC liquid medium. PETC medium can be replaced with YTF medium without significant loss of transformation efficiencies. About 15 to 16 h before preparation of competent cells, a mid- to late-log-phase culture was transferred into two serum bottles containing 100 ml fresh PETC medium supplemented with 40 mM DL-threonine (final optical density at 600 nm [OD₆₀₀], =0.004). After overnight growth at 37° C., early-log phase cells (OD₆₀₀ 0.2 to 0.3; 200 ml) were harvested by centrifugation at 10,000 rpm for 10 min at 4° C. The cells were washed twice with 200 ml of SMP wash buffer and resuspended in the same buffer at a final concentration of 10¹⁰ to 10¹¹ cells/ml. Antifreezing buffer (60% DMSO—40% SMP, pH 6) was added to the competent cells a tone-fifth of the final resuspension volume to achieve a final concentration of 10% DMSO. The resulting competent cells (25 μl/tube) were stored at 80° C. for future use. The competence of these frozen competent cells remained stable for about 1 month.

[0659] Electro-Transformation Procedures for C. ljungdahlii

[0660] All procedures were carried out in an anaerobic chamber. Electro competent C. ljungdahlii cells (25 μL) were quickly transferred on ice from a 80° C. freezer to an anaerobic chamber. After thawing on ice (about 1 min), the cells were mixed with 1 to 5 μg DNA and transferred to a pre chilled, 0.1-cm-gap Gene Pulser cuvette (Bio-Rad). Cells were pulsed at 0.625 kV with resistance at 600 Ohm and a capacitance of 25 μF by using a Gene Pulser Xcellmicrobial electroporation system (Bio-Rad). Immediately after the pulse, cells were recovered with 0.5 ml of fresh PETC medium, transferred to a pressure tube containing 10 ml of PETC medium supplemented with 5 mM L-cysteine (pH 7), and incubated at 37° C. The electroporated cells were allowed to recover at 37° C. until their cell densities were higher than immediately after the electroporation (about 9 to 12 h). Five-milliliter volumes of the outgrowth cultures or appropriately diluted cultures were mixed with 20 ml of RCM molten agar (1.5%) containing an appropriate antibiotic and poured into a petri dish. After the agar mixtures were solidified, plates were incubated upside down.

[0661] Transformed Plasmids:

| Nr. | Name (Sequence) |
|---|---|
| 1 | BG282 (SEQ ID NO: 17) |
| 2 | BG281 (SEQ ID NO: 18) |
| 3 | BG287 (SEQ ID NO: 19) |
| 4 | BG288 (SEQ ID NO: 20) |
| 5 | BG289 (SEQ ID NO: 21) |
| 6 | BG290 (SEQ ID NO: 22) |
| 7 | BG291 (SEQ ID NO: 23) |
| 8 | BG292 (SEQ ID NO: 24) |
| 9 | BG178 (SEQ ID NO: 25) |

[0662] All plasmids except BG178 (9) could be transformed in Clostridium ljungdahlii and Clostridium autoethanogenum.

[0663] Chromosomal Integration in Clostridium ljungdahlii

[0664] Transformands were cultured in liquid triplicates using YTX (5 g/L xylose) with 5 μg/mL clarithromycin. Serial Transfer with fresh medium (YTX containing 5 g/L xylose and 5 μg/mL clarithromycin) was performed 3 times. After that 5 μL were spotted on YTG plates without antibiotics. 4 colonies of each plate were picked and struck simultaneously on YTG plates with 5 μg/mL clarithromycin, YTG plates with 5 μg/mL thiamphenicol and on plates without antibiotics.

[0665] The integrands (those who were clarithromycin but not thiamphenicol resistant) were cultivated for the preparation of genomic DNA. Preparation of genomic DNA of the Clostridium ljungdahlii integration strains was performed using a kit from Macherey-Nagel (special protocol for difficult to lyse bacteria). Approx. 10 mL liquid culture were used. Concentration of gDNA was determined by nanodrop. Results are depicted in the table of FIG. 65.

[0666] PCR Verification of Integrands

[0667] PCR on gDNA of putative integrands was performed with annealing temperature 55° C., elongation time 5 min and 30 cycles using the following primers (amplifying the integration cassette):

Primer forward:
(SEQ ID NO: 92)
CTGTCTCTTATACACATCTGCTGATAAGTCCCCGGTC.
Primer reverse:
(SEQ ID NO: 93)
CTGTCTCTTATACACATCTGCTGATAAGTCCCCGGTC.

[0668] The PCR products were then examined by 0.8% analytic DNA agarose gel electrophoresis.

[0669] The result can be taken from FIG. 28. Lane 1: 3 μL ladder 1 kB purchased from Roth; Lane 2-9: integrand LBI 105-111 PCR; result: 4,5,6,7,8 positive 1,2,3 negative; Lane 10: 3 μL ladder 1 kB purchased from Roth; Lane 11-18: integrand LBI 112-120 PCR; result: 1,2,5,7,8 positive 3,4,6 negative; Lane 19: 3 μL ladder 1 kB purchased from Roth; Lane 24-25: positive control PCR; result: 1,2 positive; Lane 26-27: negative control gDNA C. ljungdahlii gDNA PCR; negative; Lane 28-29: negative control gDNA C. autoethanogenum gDNA PCR; negative; Lane 30: 3 μL ladder 1 kB purchased from Roth.

[0670] Analysis: the integration cassette of at least some of the integrands can be amplified by PCR. This shows that with the help of a positive selection system cargo in this case up to 10 kb could be integrated.

### Chromosomal Integration in Clostridium autoethanogenum

[0671] A single construct, BG289, was selected for integration. Transformands of BG289 were cultured YTX (5 g/L xylose) with 5 μg/mL clarithromycin. Serial Transfer with fresh medium (YTX containing 5 g/L xylose and 5 μg/mL clarithromycin) was performed 3 times. After that 5 μL were spotted on YTG plates without antibiotics. 10 colonies were picked and struck simultaneously on YTG plates with 5 μg/mL clarithromycin, YTG plates with 5 μg/mL thiamphenicol and on plates without antibiotics. This resulted in four integrands. The integrands (those who were clarithromycin but not thiamphenicol resistant) were cultivated for the preparation of genomic DNA. Preparation of genomic DNA of the Clostridium autoethanogenum integrands was performed using a kit from Macherey-Nagel (special protocol for difficult to lyse bacteria). Approx. 10 mL liquid culture was used. Concentration of gDNA was determined by nanodrop.

[0672] PCR Verification of Integrands

[0673] PCR on gDNA of putative integrands was performed with annealing temperature 55° C., elongation time 60 sec and 30 cycles using the following primers (binding to the enzyme in the integration cassette):

| SEQ ID NO: 94 | |
|---|---|
| Primer forward: | GGGTTGCCTTACTGGTTAG. |
| SEQ ID NO: 95 | |
| Primer reverse: | GCAGTATCGGTTCGGTAATC. |

[0674] The PCR products were then examined by 0.8% analytic DNA agarose gel electrophoresis. The result is shown in FIG. 29. Lane 1: 3 μL ladder 1 kB purchased from Roth; Lane 2-5: integrand A1-A4 PCR; result: 3 positive 1,2,4 negative; Lane 6-7: positive control PCR; result: 1,2 positive; Lane 8-9: negative control gDNA C. ljungdahlii gDNA PCR; negative; Lane 10-11: negative control gDNA C. autoethanogenum gDNA PCR, negative; Lane 12: 3 μL ladder 1 kB purchased from Roth.

[0675] Analysis: The integrated enzyme can be amplified from gDNA sample A3. This indicates that the system works with broad host range within the genus Clostridium.

### Example 5: Synthesis of 2-methyl-1,3-butadiene

[0676] FIG. 48 and FIG. 49 show the plasmids SG726 (SEQ ID NO: 44) and SG705 (SEQ ID NO: 45), respectively, which each contain sequences encoding enzymes of a 2-methyl-1,3-butadiene pathway (for genes see also reference numerals). FIG. 49 shows the plasmid SG705 (SEQ ID NO: 45) which contains the sequences encoding enzymes of an engineered 2-methyl-1,3- butadiene pathway (for genes see also reference numerals). Preparation of electrocompetent C. ljungdahlii cells and electrotransformation were carried out as described in Example 1 (see also Example 3). 2-methyl-1,3-butadiene production was performed as described in Example 1. 2-methyl-1,3-butadiene formation could be detected by GC-MS as described above.

[0677] The two plasmids were also used to engineer Clostridium ljungdahlii and Clostridium autoethanogenum cells chromosomally to produce 2-methyl-1,3-butadiene. The protocol and process described in Example 1 was performed. Additionally, CO and a mixture of CO₂ and CO, as well as CO and electrons and/or CO₂ and electrons were also successfully used as substrates.

### Example 6: Synthesis of 2-methyl-1,3-butadiene

[0678] FIG. 6 and FIG. 5A show the plasmids SG156 (SEQ ID NO: 7) and SG123 (SEQ ID NO: 5), respectively, which each contain sequences encoding enzymes of a 2-methyl-1,3-butadiene pathway (for genes see also reference numerals). FIG. 5B and FIG. 7 show the plasmids SG124 (SEQ ID NO: 6) and SG157 (SEQ ID NO: 8), respectively, which each contain the sequences encoding enzymes of further engineered 2-methyl-1,3- butadiene pathways (for genes see also reference numerals). Preparation of electrocompetent C. ljungdahlii cells and electrotransformation were carried out as described in Example 1 (see also Example 3). 2-Methyl-1,3-butadiene production was performed as described in Example 1 with 100% CO₂. FIGS. 8A and 8B show the product analysis by GC-MS using a Shimadzu GC-MS QP5050A. Samples were taken via a 500 μL Hamilton Gastight syringe. 500 μL headspace were collected and loaded onto a RXI-5 ms column 30 m, 0.25 mm ID and 0.25 μm DF (Restek), using a split of −1. Separation was carried out isocratically at 30° C. (inject-temperature 60° C.; SIM recorded with m/z=67). The spectrum shows a perfect match with 2-methyl-1,3-butadiene.

[0679] The four plasmids were also used to engineer Clostridium ljungdahlii and Clostridium autoethanogenum cells chromosomally to produce 2-methyl-1,3-butadiene. The protocol and process described in Example 1 was performed. Both 100% CO₂ and a mixture of 50% CO₂ and 50% CO were also successfully used as substrates.

### Example 7: Synthesis of 1,3-butadiene

[0680] FIG. 50 shows the plasmid SG714 (SEQ ID NO: 46) which contains the sequences encoding enzymes of an engineered 1,3-butadiene pathway (for genes see also reference numerals). FIG. 51 shows the plasmid SG739 (SEQ ID NO: 47) which contains the sequences encoding enzymes of a second engineered 1,3-butadiene pathway (for genes see also reference numerals). Preparation of electrocompetent C. ljungdahlii cells and electrotransformation were carried out as described in Example 1 (see also Example 3). 1,3-butadiene production was performed as described in Example 1. 1,3-butadiene production could be detected by GC-MS as described above.

[0681] The two plasmids were also used to engineer Clostridium ljungdahlii and Clostridium autoethanogenum cells chromosomally to produce 1,3-butadiene. The same protocol and process like described in Example 1 was performed. Additionally, CO and a mixture of CO₂ and CO, as well as CO and electrons and/or CO₂ and electrons were also successfully used as substrates.

### Example 8: Synthesis of 1,3-butadiene

[0682] FIG. 34 shows the plasmid SG387 (SEQ ID NO: 30) which contains the sequences encoding enzymes of an engineered 1,3-butadiene pathway (for genes see also reference numerals). FIG. 35 shows the plasmid SG411 (SEQ ID NO: 31) which contains the sequences encoding enzymes of a second engineered 1,3-butadiene pathway (for genes see also reference numerals).

[0683] The construction of the expression plasmids was performed by standard recombinant DNA and molecular cloning techniques using genes from Clostridium acetobutylicum ATCC 824, Clostridium carboxidivorans, Escherichia coli, Ralstonia eutropha H16, Aeromonas caviae, Streptomyces sp. strain CL190, Saccharomyces cerevisiae S288c, Bacillus subtilis, Clostridium ljungdahlii DSM 13528 DSM 13528, Escherichia coli BL21(DE3), Clostridium sp. M62/1, Clostridium botulinum BKT015925, Clostridium kluyveri DSM 555, Acidaminococcus fermentans DSM 20731, Clostridium propionicum, Chloroflexus aurantiacus J-10-fl, Haemophilus influenzae R2866, Pseudomonas putida KT2440, Treponema denticola ATCC 35405, Thauera linaloolentis and Mycobcaterium JDM601.

[0684] Preparation of electrocompetent C. ljungdahlii cells and electrotransformation were carried out as described in Example 1 (see also Example 3). For plasmid SG714 1,3-butadiene production was performed as described in Example 1 with 100% CO₂. For plasmid SG739 1,3-butadiene production was performed as described in Example 1 with 30% CO₂, and 60% H₂. 1,3-butadiene production could in both cases be detected by GC-MS as described above.

[0685] The two plasmids were also used to engineer Clostridium ljungdahlii and Clostridium autoethanogenum cells chromosomally to produce 1,3-butadiene. The same protocol and process like described in Example 1 was performed. Additionally, CO and a mixture of CO₂ and CO, as well as CO and electrons and/or CO₂ and electrons were also successfully used as substrates.

### Example 9: Synthesis of Propene

[0686] FIG. 36 shows the plasmid SG455 (SEQ ID NO: 32) which contains the sequences encoding enzymes of an engineered propene pathway (for genes see also reference numerals). FIG. 52 shows the plasmid SG755 (SEQ ID NO: 48) which contains the sequences encoding enzymes of a further engineered propene pathway. FIG. 53 shows the plasmid SG779 (SEQ ID NO: 49) which contains the sequences encoding enzymes of another engineered propene pathway. FIG. 37 shows the plasmid SG479 (SEQ ID NO: 33) which contains the sequences encoding enzymes of yet another engineered propene pathway.

[0687] The construction of the expression plasmids was performed by standard recombinant DNA and molecular cloning techniques using genes from Clostridium acetobutylicum ATCC 824, Clostridium carboxidivorans, Escherichia coli, Ralstonia eutropha H16, Aeromonas caviae, Streptomyces sp. strain CL190, Saccharomyces cerevisiae S288c, Bacillus subtilis, Clostridium ljungdahlii DSM 13528 DSM 13528, Escherichia coli BL21(DE3), Clostridium sp. M62/1, Clostridium botulinum BKT015925, Clostridium kluyveri DSM 555, Acidaminococcus fermentans DSM 20731, Clostridium propionicum, Chloroflexus aurantiacus J-10-fl, Haemophilus influenzae R2866, Pseudomonas putida KT2440, Treponema denticola ATCC 35405, Mus musculus, Metallosphaera sedula DSM 5348 and Staphylococcus aureus.

[0688] Preparation of electrocompetent C. ljungdahlii DSM 13528 cells and electrotransformation were carried out as described in Example 1. Propene production was performed as described in Example 1. Propene production could be detected by GC-MS as described above.

[0689] The three plasmids were also used to engineer Clostridium autoethanogenum DSM 10061 and Clostridium aceticum cells to produce propene. The same protocol and process as described in Example 1 was performed. Additionally, CO and a mixture of CO₂ and CO, as well as CO and electrons and/or CO₂ and electrons were also successfully used as substrates.

### Example 10: Synthesis of 1-butene

[0690] FIG. 38 shows the plasmid SG539 (SEQ ID NO: 34) which contains the sequences encoding enzymes of an engineered 1-butene pathway (for genes see also reference numerals). FIG. 39 shows the plasmid SG523 (SEQ ID NO: 35) which contains the sequences encoding enzymes of another engineered 1-butene pathway. FIG. 54 shows the plasmid SG839 (SEQ ID NO: 50) which contains the sequences encoding enzymes of another engineered 1-butene pathway. FIG. 55 shows the plasmid SG823 (SEQ ID NO: 51) which contains the sequences encoding enzymes of yet a further engineered 1-butene pathway.

[0691] The construction of the expression plasmids was performed by standard recombinant DNA and molecular cloning techniques using genes from Clostridium acetobutylicum ATCC 824, Clostridium carboxidivorans, Escherichia coli, Ralstonia eutropha H16, Aeromonas caviae, Streptomyces sp. strain CL190, Saccharomyces cerevisiae S288c, Bacillus subtilis, Clostridium ljungdahlii DSM 13528 DSM 13528, Escherichia coli BL21(DE3), Clostridium sp. M62/1, Clostridium botulinum BKT015925, Clostridium kluyveri DSM 555, Acidaminococcus fermentans DSM 20731, Clostridium propionicum, Chloroflexus aurantiacus J-10-fl, Haemophilus influenzae R2866, Pseudomonas putida KT2440, Treponema denticola ATCC 35405, Mus musculus, Metallosphaera sedula DSM 5348 and Staphylococcus aureus.

[0692] Preparation of electrocompetent C. autoethanogenum DSM 10061 cells and electrotransformation were carried out as described in Example 1 (see also Example 3). 1-Butene production was performed as described in Example 1. 1-Butene production could be detected by GC-MS as described above.

[0693] The three plasmids were also used to engineer Clostridium ljungdahlii DSM 13528 and Clostridium aceticum cells to produce 1-butene. The same protocol and process as described in Example 1 was performed. Additionally, CO and a mixture of CO₂ and CO, as well as CO and electrons and/or CO₂ and electrons were also successfully used as substrates.

### Example 11: Synthesis of Isobutene (2-methylpropene)

[0694] FIG. 41 shows the plasmid SG601 (SEQ ID NO: 37), which contains the sequences encoding enzymes of an engineered isobutene pathway (for genes see also reference numerals). FIG. 40 shows the plasmid SG582 (SEQ ID NO: 36), which contains the sequences encoding enzymes of a further engineered isobutene pathway (for genes see also reference numerals). FIG. 56 shows the plasmid SG882 (SEQ ID NO: 52), which contains the sequences encoding enzymes of yet another engineered isobutene pathway (for genes see also reference numerals). FIG. 57 shows the plasmid SG901 (SEQ ID NO: 53), which contains the sequences encoding enzymes of yet another engineered isobutene pathway (for genes see also reference numerals).

[0695] The construction of the expression plasmids was performed by standard recombinant DNA and molecular cloning techniques using genes from Clostridium acetobutylicum ATCC 824, Clostridium carboxidivorans, Escherichia coli, Ralstonia eutropha H16, Aeromonas caviae, Streptomyces sp. strain CL190, Saccharomyces cerevisiae S288c, Bacillus subtilis, Clostridium ljungdahlii DSM 13528 DSM 13528, Escherichia coli BL21(DE3), Clostridium sp. M62/1, Clostridium botulinum BKT015925, Clostridium kluyveri DSM 555, Acidaminococcus fermentans DSM 20731, Clostridium propionicum, Chloroflexus aurantiacus J-10-fl, Haemophilus influenzae R2866, Pseudomonas putida KT2440, Treponema denticola ATCC 35405, Mus musculus, Metallosphaera sedula DSM 5348 and Staphylococcus aureus.

[0696] Preparation of electrocompetent C. ljungdahlii DSM 13528 cells and electrotransformation were carried out as described in Example 1 (see also Example 3). Isobutene production was performed as described in Example 1 with 30% CO₂, and 60% H2. Isobutene production could be detected by GC-MS as described above. FIG. 67 shows the analysis of the obtained product via GC-MS, measured on an Agilent 5977E GCMSD. The column used was a Restek Rt-Alumina BOND/MAPD, 30 m×0.32 mm; df 5 μm. Carriers gas: helium. SIM 56 m/z. 500 μL headspace injection using GERSTEL-MultiPurposeSampler 2XL-XT. The spectrum shows a perfect match to isobutene (2-methylpropene).

[0697] The two plasmids were also used to engineer Clostridium autoethanogenum DSM 10061 and Clostridium aceticum cells to produce ethene. The same protocol and process as described in Example 1 was performed. Additionally, CO and a mixture of CO₂ and CO, as well as CO and electrons and/or CO₂ and electrons were also successfully used as substrates.

### Example 12: Synthesis of 1-pentene

[0698] FIG. 42 and FIG. 43 show the plasmids SG498 (SEQ ID NO: 38) and SG513 (SEQ ID NO: 39), respectively, which each contain sequences encoding enzymes of an engineered 1-pentene pathway (for genes see also reference numerals). FIG. 58 and FIG. 59 show the plasmids SG798 (SEQ ID NO: 54) and SG813 (SEQ ID NO: 55), respectively, which each contain the sequences encoding enzymes of another engineered 1-pentene pathway.

[0699] The construction of the expression plasmids was performed by standard recombinant DNA and molecular cloning techniques using genes from Clostridium acetobutylicum ATCC 824, Clostridium carboxidivorans, Escherichia coli, Ralstonia eutropha H16, Aeromonas caviae, Streptomyces sp. strain CL190, Saccharomyces cerevisiae S288c, Bacillus subtilis, Clostridium ljungdahlii DSM 13528 DSM 13528, Escherichia coli BL21(DE3), Clostridium sp. M62/1, Clostridium botulinum BKT015925, Clostridium kluyveri DSM 555, Acidaminococcus fermentans DSM 20731, Clostridium propionicum, Chloroflexus aurantiacus J-10-fl, Haemophilus influenzae R2866, Pseudomonas putida KT2440, Treponema denticola ATCC 35405, Mus musculus, Metallosphaera sedula DSM 5348 and Staphylococcus aureus.

[0700] Preparation of electrocompetent Clostridium autoethanogenum DSM 10061 cells and electrotransformation were carried out as described in Example 1. 1-Pentene production was performed as described in Example 1 with 100% CO₂. 1-Pentene production could be detected by GC-MS as described above.

[0701] The two plasmids were also used to engineer Clostridium ljungdahlii DSM 13528 and Clostridium aceticum cells to produce 1-pentene. The same protocol and process as described in Example 1 was performed. Additionally, CO and a mixture of CO₂ and CO, as well as CO and electrons and/or CO₂ and electrons were also successfully used as substrates.

### Example 13: Synthesis of Ethene

[0702] FIG. 44, FIG. 45, FIG. 60, and FIG. 61 show the plasmids SG557 (SEQ ID NO: 40), SG598 (SEQ ID NO: 41), SG857 (SEQ ID NO: 56), and SG898 (SEQ ID NO: 57), respectively, which each contain sequences encoding enzymes of an engineered ethene pathway (for genes see also reference numerals).

[0703] The construction of the expression plasmids was performed by standard recombinant DNA and molecular cloning techniques using genes from Clostridium acetobutylicum ATCC 824, Clostridium carboxidivorans, Escherichia coli, Ralstonia eutropha H16, Aeromonas caviae, Streptomyces sp. strain CL190, Saccharomyces cerevisiae S288c, Bacillus subtilis, Clostridium ljungdahlii DSM 13528 DSM 13528, Escherichia coli BL21(DE3), Clostridium sp. M62/1, Clostridium botulinum BKT015925, Clostridium kluyveri DSM 555, Acidaminococcus fermentans DSM 20731, Clostridium propionicum, Chloroflexus aurantiacus J-10-fl, Haemophilus influenzae R2866, Pseudomonas putida KT2440, Treponema denticola ATCC 35405, Mus musculus, Metallosphaera sedula DSM 5348 and Staphylococcus aureus.

[0704] Preparation of electrocompetent Clostridium ljungdahlii DSM 13528 cells and electrotransformation were carried out as described in Example 1. Ethene production was performed as described in Example 1 with 30% CO₂, and 60% H₂. Ethene production could be detected by GC-MS as described above.

[0705] The two plasmids were also used to engineer Clostridium autoethanogenum DSM 10061 and Clostridium aceticum cells to produce ethene. The same protocol and process as described in Example 1 was performed. Additionally, CO and a mixture of CO₂ and CO, as well as CO and electrons and/or CO₂ and electrons were also successfully used as substrates.

[0706] All publications mentioned herein are incorporated herein by reference to disclose and describe the methods and/or materials in connection with which the publications are cited, as if each individual publication, including patent application, were specifically and individually indicated to be incorporated by reference. In case of conflict, the present specification, including definitions, will prevail. The publications discussed herein are provided solely for their disclosure prior to the filing date of the present application. Nothing herein is to be construed as an admission that the present invention is not entitled to antedate such publication by virtue of prior invention. Further, the dates of publication provided herein can be different from the actual publication dates, which can require independent confirmation.

[0707] Unless otherwise expressly stated, it is in no way intended that any method or aspect set forth herein be construed as requiring that its steps be performed in a specific order. Accordingly, where for a claimed method it is not specifically stated in the claims or descriptions that the steps are to be limited to a specific order, it is no way intended that an order be inferred, in any respect. This holds for any possible non-express basis for interpretation, including matters of logic with respect to arrangement of steps or operational flow, plain meaning derived from grammatical organization or punctuation, or the number or type of aspects described in the specification.

The application's sequence listing, which the Patent Office published only in electronic form, follows.

SEQUENCE LISTING (95 sequences)

SEQ ID NO: 1 - DNA, 35127 bp, artificial sequence
  plasmid SG193
acggtcctgcatcagctcttatatattaagctaccaacttagtatataagccaaaacttaaatgtgctaccaacacatcaagccgttagagaactctatctatagcaatatttcaaatgtaccgacatacaagagaaacattaactatatatattcaatttatgagattatcttaacagatataaatgtaaattgcaataagtaagatttagaagtttatagcctttgtgtattggaagcagtacgcaaaggcttttttatttgataaaaattagaagtatatttattttttcataattaatttatgaaaatgaaagggggtgagcaaagtgacagaggaaagcagtatcttatcaaataacaaggtattagcaatatcattattgactttagcagtaaacattatgacttttatagtgcttgtagctaagtagtacgaaagggggagctttaaaaagctccttggaatacatagaattcataaattaatttatgaaaagaagggcgtatatgaaaacttgtaaaaattgcaaagagtttattaaagatactgaaatatgcaaaatacattcgttgatgattcatgataaaacagtagcaacctattgcagtaaatacaatgagtcaagatgtttacataaagggaaagtccaatgtattaattgttcaaagatgaaccgatatggatggtgtgccataaaaatgagatgttttacagaggaagaacagaaaaaagaacgtacatgcattaaatattatgcaaggagctttaaaaaagctcatgtaaagaagagtaaaaagaaaaaataatttatttattaatttaatattgagagtgccgacacagtatgcactaaaaaatatatctgtggtgtagtgagccgatacaaaaggatagtcactcgcattttcataatacatcttatgttatgattatgtgtcggtgggacttcacgacgaaaacccacaataaaaaaagagttcggggtagggttaagcatagttgaggcaactaaacaatcaagctaggatatgcagtagcagaccgtaaggtcgttgtttaggtgtgttgtaatacatacgctattaagatgtaaaaatacggataccaatgaagggaaaagtataatttttggatgtagtttgtttgttcatctatgggcaaactacgtccaaagccgtttccaaatctgctaaaaagtatatcctttctaaaatcaaagtcaagtatgaaatcataaataaagtttaattttgaagttattatgatattatgtttttctattaaaataaattaagtatatagaatagtttaataatagtatatacttaatgtgataagtgtctgacagtgtcacagaaaggatgattgttatggattataagcggccggccagtgggcaagttgaaaaattcacaaaaatgtggtataatatctttgttcattagagcgataaacttgaatttgagagggaacttagatggtatttgaaaaaattgataaaaatagttggaacagaaaagagtattttgaccactactttgcaagtgtaccttgtacctacagcatgaccgttaaagtggatatcacacaaataaaggaaaagggaatgaaactatatcctgcaatgctttattatattgcaatgattgtaaaccgccattcagagtttaggacggcaatcaatcaagatggtgaattggggatatatgatgagatgataccaagctatacaatatttcacaatgatactgaaacattttccagcctttggactgagtgtaagtctgactttaaatcatttttagcagattatgaaagtgatacgcaacggtatggaaacaatcatagaatggaaggaaagccaaatgctccggaaaacatttttaatgtatctatgataccgtggtcaaccttcgatggctttaatctgaatttgcagaaaggatatgattatttgattcctatttttactatggggaaatattataaagaagataacaaaattatacttcctttggcaattcaagttcatcacgcagtatgtgacggatttcacatttgccgttttgtaaacgaattgcaggaattgataaatagttaacttcaggtttgtctgtaactaaaaacaagtatttaagcaaaaacatcgtagaaatacggtgttttttgttaccctaagtttgttaagggatgcataaactgcatcccttaacttgtttttcgtgtacctattttttgtgaatcgattatgtcttttgcgcattcgtcgacaattgcatatattgataaaaataataatagtgggtataattaagttgttaggaggttagttagagtgaaaccagtaacgttatacgatgtcgcagagtatgccggtgtctcttatcagaccgtttcccgcgtggtgaaccaggccagccacgtttctgcgaaaacgcgggaaaaagtggaagcggcgatggcggagctgaattacattcccaaccgcgtggcacaacaactggcgggcaaacagtcgttgctgattggcgttgccacctccagtctggccctgcacgcgccgtcgcaaattgtcgcggcgattaaatctcgcgccgatcaactgggtgccagcgtggtggtgtcgatggtagaacgaagcggcgtcgaagcctgtaaagcggcggtgcacaatcttctcgcgcaacgcgtcagtgggctgatcattaactatccgctggatgaccaggatgccattgctgtggaagctgcctgcactaatgttccggcgttatttcttgatgtctctgaccagacacccatcaacagtattattttctcccatgaagacggtacgcgactgggcgtggagcatctggtcgcattgggtcaccagcaaatcgcgctgttagcgggcccattaagttctgtctcggcgcgtctgcgtctggctggctggcataaatatctcactcgcaatcaaattcagccgatagcggaacgggaaggcgactggagtgccatgtccggttttcaacaaaccatgcaaatgctgaatgagggcatcgttcccactgcgatgctggttgccaacgatcagatggcgctgggcgcaatgcgcgccattaccgagtccgggctgcgcgttggtgcggacatctcggtagtgggatacgacgataccgaagacagctcatgttatatcccgccgttaaccaccatcaaacaggattttcgcctgctggggcaaaccagcgtggaccgcttgctgcaactctctcagggccaggcggtgaagggcaatcagctgttgcccgtctcactggtgaaaagaaaaaccaccctggcgcccaatacgcaaaccgcctctccccgcgcgttggccgattcattaatgcagctggcacgacaggtttcccgactggaaagcgggcagtgagcgcaacgcaattaatgtaagttagctcactcattaggcaccgggatctcgaccgatgcccttgagagccttcaacccagtcagctccttccggtgggcgcggggcatgactagcatgatcgtgctcctgtcgttgaggacccggctaggctggcggggttgccttactggttagcagaatgaatcaccgatacgcgataacttcgtataatgtatgctatacgaacggtagctcagctagcacccggaattgtgagcggataacaattccttggaattgtgagcggataacaattataattaagttgttaggagggaacttagatgaccccggccaacccgaccctgagcaacgagccgcaagcgcctcacgccgagagcgacgagctgcttcccgagatctttcgccagacggtggagcatgcgcccatcgccatttccatcaccgacctcaaggccaacattctttacgccaatcgcgctttccgcaccatcaccggctacggcagcgaggaagtgctcggcaagaacgaatcgatcctctccaacggcaccacgccgcgcctggtctaccaggccctgtggggccggctggcgcagaagaagccctggtccggcgtgctggtcaaccgccgcaaggacaagaccctgtacctggccgaactgaccgtggcgccggtgctcaacgaggccggcgagaccatctactacctgggcatgcaccgcgacaccagcgaattgcacgaactggaacaacgcgtcaacaaccagcgcctgatgatcgaggcggtggtcaacgccgccccggcggcgatggtggtgctcgaccgccagcaccgggtgatgctctccaacccgagcttctgccgcctggcccgcgacctggtcgaggatggcagcagcgagagcctggtggcgctgctgcgggaaaacctcgccgcccccttcgagacgctggaaaaccagggcagcgccttctccggcaaggagatctccttcgacctgggcggccgctcgccgcgctggctgtcctgccacggccgggccatccacatcgagaacgagcaggcccacgtgttcttcgcgcccaccgaggaacgctacctgctgctgaccatcaacgacatctccgagctgcgccagaagcagcaggattcgcggctcaacgcgctgaaggcgctgatggccgaggaagagctgctggaaggcatgcgcgagaccttcaacgccgccatccatcgcctgcagggcccggtcaacctgatcagcgcggcgatgcgcatgctcgaacggcgcctcggcgacaaggccggcaacgacccggtgctgagcgccatgcgcgaagccagcacggccggaatggaggcactggagaacctcagtggctccattccggtgcgcatggccgagtccaagatgccggtcaacctcaaccagttgatccgcgaggtgatcaccctgtgcaccgaccagttgctggcccagggcatcgtcgtcgactggcagccggcgctgcgcctgccctgggtgatgggcggggaaagcagcctgcgcagcatgatcaagcacctggtcgacaacgccatcgagtccatgagccagaaccaggtcagccgccgcgagctgttcatcagcacccgcgtggagaaccacctggtgcgcatggagatcaccgacagcggcccgggcattccgcccgacctggtgctgaaggtgttcgagccgttcttcagcaccaagccgccacaccgcgtcgggcgcggcatgggcctgccggtggtgcaggagatcgtcgccaagcacgccggcatggtgcacgtagacaccgactatcgcgaaggctgccggatcgtcgtcgagctgcccttctcggcctccacctgaacagcgacagggaatgcccatgaatgcaaccatccctcagcgctcggccaaacagaacccggtcgaactctatgacctgcaattgcaggccctggcgagcatcgcccgcacgctcagccgcgaacaacagatcgacgaactgctcgaacaggtcctggccgtactgcacaatgacctcggcctgctgcatggcctggtgaccatttccgacccggaacacggcgccctgcagatcggcgccatccacaccgactcggaagcggtggcccaggcctgcgaaggcgtgcgctacagaagcggcgaaggcgtgatcggcaacgtgctcaagcacggcaacagcgtggtgctcgggcgcatctccgccgacccgcgctttctcgaccgcctggcgctgtacgacctggaaatgccgttcatcgccgtgccgatcaagaaccccgagggcaacaccatcggcgtgctggcggcccagccggactgccgcgccgacgagcacatgcccgcgcgcacgcgccttctggagatcgtcgccaacctgctggcgcagaccgtgcgcctggtggtgaacatcgaggacggccgcgaggcggccgacgagcgcgacgaactgcgtcgcgaggtgcgcggcaagtacggcttcgagaacatggtggtgggccacacccccaccatgcgccgggtgttcgatcagatccgccgggtcgccaagtggaacagcaccgtactggtcctcggcgagtccggtaccggcaaggaactgatcgccagcgccatccactacaactcgccgcgcgcgcaccgccccttcgtgcgcctgaactgcgccgcgctgccggaaaccctgctcgagtccgaactcttcggccacgagaagggcgccttcaccggcgcggtgaagcagcgcaaggggcgtttcgagcaggccgacggcggcaccctgttcctcgacgagatcggcgagatctcgccgatgttccaggccaagctgctgcgcgtgctgcaggaaggcgagttcgagcgggtcggcggcaaccagacggtgcgggtcaacgtgcgcatcgtcgccgccaccaaccgcgacctggaaagcgaggtggaaaagggcaagttccgcgaggacctctactaccgcctgaacgtcatggccatccgcattccgccgctgcgcgagcgtaccgccgacattcccgaactggcggaattcctgctcggcaagatcggccgccagcagggccgcccgctgaccgtcaccgacagcgccatccgcctgctgatgagccaccgctggccgggcaacgtgcgcgaactggagaactgcctggagcgctcggcgatcatgagcgaggacggcaccatcacccgcgacgtggtctcgctgaccggggtcgacaacgagagcccgccgctcgccgcgccgctgcccgaggtcaacctggccgacgagaccctggacgaccgcgaacgggtgatcgccgccctcgaacaggccggctgggtgcaggccaaggccgcgcggctgctgggcatgacgccgcggcagatcgcctaccgcatccagaccctcaacatccacatgcgcaagatctgacgggaccctccggcaatggatggccggctcctcccccctccccgttctccccgccccctcgtccgctacgggcgcccgtccacgacggacatcgcctccgactcccgccacactgcttgtcgcttgtcgtacagaagcgcgcgaagggcggtgcggatttgtccgttgcgcgacaaattcggcccctcgttttcaaataaatcattcaaaaacaattacttgaataatcggcacgggtattgctcggctcttggggtaaagactctctcagccggagacagaacatggaactgagcgtacttgggcaaaacaatgggggacagcacagcgctggcggctgttcctcaagtagctgcggcagcacgcacgatcagctctcccacctgccggaaaacattcgtgcgaaggtgcagaaccatccgtgctattcggaagaggcgcaccactatttcgcgcgcatgcacgtggcggtggcgcctgcctgcaacatccagtgccactactgcaaccgcaagtacgactgcgccaacgagtcgcgtccgggcgtggtgtccgaagtgctgacccccgagcaggcggtcaagaaggtcaaggccgtggccgccgccatcccgcagatgagcgtgctcggcatcgccggccccggcgaccccttggccaacccgaagcgcaccctcgacaccttccgcatgctcagcgagcaggccccggacatcaagctgtgcgtttccaccaacggcctggccctgccggagtgcgtcgaggaactggccaagcacaacatcgaccacgtcaccatcaccatcaactgcgtggacccggagatcggcgccaagatctatccgtggatctactggaacaacaagcgcatccgcggcgtcaaggccgccaagatcctcatcgagcagcagcagaagggtctggagatgctggtggcgcgcggcatcctggtgaaggtcaattcggtgatgatccccggcgtcaacgacgagcacctgaaggaagtcagcaagatcgtcaaggccaagggcgccttcctgcacaacgtcatgccgctgatcgccgagcccgagcacggcaccttctacggcgtgatgggccagcgcagccccgagccggaagaactgcaggacctgcaggacgcctgcgccggcgacatgaacatgatgcgccactgccgccagtgccgcgccgacgcggtcggcatgctcggcgaggaccgcggcgacgagttcaccctggacaagatcgagtcgatggagatcgattacgaggcggcgatggtcaagcgcgccgccatccatgcggcgatcaaggaagagctggacgagaaggcggcgaagaaggaacggctggctggcctgtccgttgcatccgtccagaacggcacgagcggtcgctaccgtccggtgctgatggccgtggccaccagcggcggcggcctgatcaaccagcacttcgggcacgccaccgagttcctggtgtacgaagcctcgccgtccggggtgcgcttcatcggccatcgccgggtcgaccagtactgcgtcggcaacgacacctgcggcgagaaggaaagtgcactcgccggcagcatccgtgccctgaagggatgcgaggcggtgctctgctcgaagatcggtttcgaaccctggagcgacctggagaccgccggcatccagcccaatggcgagcacgccatggagcccatcgaggaagcggtcatggcggtctaccgggaaatgatcgagtcgggtcggctggagaatgacggagccctgctgcaggccaaggcctgagcgggcagcgaaacaattcgaggattgcgtggaggtgcgtgatggcgctgaaaattgtggaatcctgtgtcaattgttgggcatgtgtcgatgtctgtccgagcgaggcgatctccctggccggcccgcacttcgagatcagtgcgagcaagtgcaccgagtgtgacggggactacgcggaaaagcagtgcgcgagcatctgtccggtcgagggcgccatcctgctcgccgacggcacgccggcaaacccgcctggttcgctgaccgggattcccccggagcgtctggccgaggccatgcgcgaaatccaggcccgctaaggagagtcgccatgaccagcaccagcatcgtcttctacgagaagcccggctgtgccaccaaccgcctgcagaagcagttgttgcgttcggccggtctgcacttggaggtccgcaacctgctcagcgaaccctggacgcccgagcgcctgcgccccttcttcggcgatcggccggtggtcgaatggttcaaccgctcggcaccggcgatcaagtacggagaactggaccccacccaactgagcgccagccaggcgctcgagctgatgctggctcacccgatcctgatccgccgcccgctgatccactacggctcgcagtacatggccggcttcgacctggtcaagctgtgtacccacctgcccgccaagaacgacctgcccgacgccggcgaggacctggaaaagcgctcggtcgggcagaacccgatcggctgcctggcggcggggaaccagtgatgggcagcgccgcggcccatcggggggataccacccaagccgtgcgtcatgacagagccaaccacctctggctggagcgcatcgtccgctcccagcgcgacggtctgagctgcctgccgttccatctgggcctcgacgagcggagctatgccgaactgatccgcacccattttcccgagctggccggccagaccagcgccagcctgggctcgctggcccacgaatgcagcgagctgcgcgaagacctactggaaatgcgccgcgacgaatgggaggaactgcgcgtcctgttgctggacggccgccgcggcgacgaccccgaagagctctggatggcgagcatcgtcgccgccgcctgcctgggtggcgatcacctgtggcgcgacctgggactcgagagccgcgagacgctgagggtcctgctgatgcacaatttcccccaccttgccgagcgcaacgtgaaaaacatgcgctggaagaagtttttctacaagcaactgtgcgaacaggatggcggctacgtctgccgctcccccagttgcgagcagtgcccgtctcatcacgattgttttggagcagagatatgatccctactccactcctgctatgcttaacaaattattcatagactctaatagcacccggaattgtgagcggataacaattccttggaattgtgagcggataacaattataattaagttgttaggagggaacttagatggctatgcgtcaatgcgccatctacggcaaaggtggtatcggtaagtccaccactactcagaacctggtggcagccctggctgagatgggcaagaaggtcatgatcgttggttgtgacccgaaagctgactccacccgcctgatcctgcactccaaggcccagaacaccatcatggaaatggctgccgaagccggtaccgtggaagatctggagctggaagacgtgctgaaggctggctacggcggcgtcaagtgcgttgagtccggtggtccggagccgggcgttggctgcgccggccgtggtgttatcaccgccatcaacttcctggaagaggaaggcgcctacgaagacgatctggacttcgtattctacgacgtgctgggcgacgtggtgtgtggcggcttcgccatgccgatccgcgagaacaaggcccaggaaatctacatcgtctgctccggtgagatgatggccatgtacgccgccaacaacatctccaagggcatcgtgaagtatgccaactccggcagcgtgcgtctgggcggcctgatctgcaacagccgtaacaccgaccgcgaagacgagctgatcatcgctctggccaacaagctgggcacccagatgatccacttcgtgccgcgtgacaacgtcgtgcagcgcgccgaaatccgccgcatgaccgtgatcgaatacgatccgaaagccaagcaagccgacgaataccgcgctctggcccgcaaggtcgtcgacaacaaactgctggtcatcccgaacccgatcaccatggacgagctcgaagagctgctgatggaattcggcatcatggaagtcgaagacgaatccatcgtcggcaaaaccgccgaagaagtctgatagccgctccggtttcagaaggacgggacagggcagattggctctgtcggggtggcgccccccgcatggggcgggcgccccacccgttacccgcatatgaacgctaaggcaagaggagtcatacccatgaccggtatgtcgcgcgaagaggttgaatccctcatccaggaagttctggaagtttatcccgagaaggctcgcaaggatcgtaacaagcacctggccgtcaacgacccggcggttacccagtccaagaagtgcatcatctccaacaagaagtcccagcccggtctgatgaccatccgcggctgcgcctacgccggttccaaaggcgtggtctggggccccatcaaggacatgatccacatctcccacggtccggtaggctgcggccagtattcgcgcgccggccgtcgtaactactacatcggtaccaccggtgtgaacgccttcgtcaccatgaacttcacctcggacttccaggagaaggacatcgtgttcggtggcgacaagaagctcgccaaactgatcgacgaagtggaaaccctgttcccgctgaacaagggtatctccgtccagtccgagtgcccgatcggcctgatcggcgacgacatcgaatccgtgtccaaggtcaagggcgccgagctcagcaagaccatcgtaccggtccgttgcgaaggcttccgcggcgtttcccagtccctgggccaccacatcgccaacgacgcagtccgcgactgggtcctgggcaagcgtgacgaagacaccaccttcgccagcactccttacgatgtggccatcatcggcgactacaacatcggcggcgacgcctggtcttcccgcatcctgctggaagaaatgggcctgcgttgcgtagcccagtggtccggcgacggctccatctccgaaatcgagctgaccccgaaggtcaagctgaacctggttcactgctaccgctcgatgaactacatctcccgtcacatggaagagaagtacggtatcccatggatggagtacaacttcttcggcccgaccaagaccatcgagtcgctgcgtgccatcgccgccaagttcgacgagagcatccagaagaagtgcgaagaggtcatcgccaagtacaagcccgagtgggaagcggtggtcgccaagtaccgtccgcgcctggaaggcaagcgcgtcatgctctacatcggtggcctgcgtccgcgccacgtgatcggcgcctacgaagacctgggcatggaagtggtgggtaccggctacgagttcgcccacaacgacgactatgaccgcaccatgaaagaaatgggtgactccaccctgctgtacgatgacgtgaccggctacgaattcgaagaattcgtcaagcgcatcaagcccgacctgatcggctccggtatcaaggagaagttcatcttccagaagatgggcatccccttccgtcaaatgcactcctgggattattccggcccctaccacggcttcgatggcttcgccatcttcgcccgtgacatggacatgaccctgaacaatccgtgctggaagaaactgcaggctccctgggaagcttccgaaggcgccgagaaagtcgccgccagcgcctgatagcagagcaatcgtacgcaacgtccgctgcgggcggtttccgcccgcggccgacatccgctaacgccgttcacagatgagtgaggcgtaggagagagtcatgagccagcaagtcgataaaatcaaagccagctacccgctgttcctcgatcaggactacaaggacatgcttgccaagaagcgcgacggcttcgaggaaaagtatccgcaggacaagatcgacgaagtattccagtggaccaccaccaaggaataccaggagctgaacttccagcgcgaagccctgaccgtcaacccggccaaggcttgccagccgctgggcgccgttctctgcgccctcggtttcgagaagaccatgccctacgtgcacggttcccagggttgcgtcgcctacttccgctcctacttcaaccgtcatttccgcgagccggtttcctgcgtttccgactccatgaccgaagacgcggcagtgttcggcggccagcagaacatgaaggacggtctgcagaactgtaaggctacctacaagcccgacatgatcgcagtgtccaccacctgcatggccgaggtcatcggtgacgacctcaacgccttcatcaacaactcgaagaaggaaggtttcattcctgacgagttcccggtgccgttcgcccataccccgagcttcgtgggcagccacgtgaccggctgggacaacatgttcgaaggcattgctcgctacttcaccctgaagtccatggacgacaaggtggttggcagcaacaagaagatcaacatcgtccccggcttcgagacctacctgggcaacttccgcgtgatcaagcgcatgctttcggaaatgggcgtgggctacagcctgctctccgatccggaagaagtgctggacaccccggctgacggccagttccgcatgtacgcgggcggcaccactcaggaagagatgaaggacgctccgaacgccctcaacaccgtcctgctgcagccgtggcacctggagaagaccaagaagttcgtcgagggtacctggaagcacgaagtaccgaagctgaacatcccgatgggcctggactggaccgacgagttcctgatgaaagtcagcgaaatcagcggccagccgattccggcgagcctgaccaaggagcgtggccgtctggtcgacatgatgaccgactcccacacctggctgcacggcaagcgtttcgccctgtggggtgatccggacttcgtgatgggcctggtcaagttcctgctggaactgggttgcgagccggtacacattctctgccacaacggcaacaagcgttggaagaaggcggtcgacgccatcctcgccgcttcgccctacggcaagaatgctaccgtctacatcggcaaggacctgtggcacctgcgttcgctggtcttcaccgacaagccggacttcatgatcggcaacagctacggtaagttcatccagcgcgacaccctgcacaagggcaaggagttcgaggttccgctgatccgtatcggcttcccgatcttcgaccgtcatcacctgcatcgctccaccaccctgggttacgagggcgccatgcagatcctgaccaccctggtgaactcgatcctggaacgtctggacgaggaaacccgcggtatgcaggccaccgactacaaccacgacctggtacgctaagtcgtcggttcaagtggtatcggccggagcggcgcaagccgctccggctcttccttggcggcggccgcaggtggtcgggccttttgcccgcgatctgcggcaaccgccaaacccgtctaaggagcaagcccatgcccagcgtcatgattcgccgcaacgacgaaggccaactgaccttctatatcgccaagaaagaccaggaagagatcgtggtgtccctggagcatgacagccccgaactctggggtggcgaagtcaccctcggcgacggttcgacctatttcatcgagccgataccgcaacccaagctgccgatcaccgtgcgcgccaagcgagccggcgaggcctgattccatgactgcgcaaccgccattcggccaggcccccctgccggcccatctggccctgcgcatcgctctggcggcacgctcgctcaagggggtggataccgcccacctgctgcgcgccctgattgccgccgttggagaacccatcacggaagcgcgtctacgcaaattgcgtgcttcccgcctgcgtacccgcctgctcgaaacgtgcggagagggtgtgcagtcgaccctgaccgatcgccagctgcacagcgcgctcggtctgctcaaaggccgtggcgtgcgcatgccggaagatcccctgccgatcccggagccctatcgcaacggtgaattccaggactcggtgcgcatcgcctgcgcttccgacaacggcgagcgcctggacggcatcttcagcaactgtacacgctttctcatctaccagatctcgccccgcgagagccgcctgatcgatctacgcgaacccggcccctgccgcgaggacgaagaccgtcatgcgcgtcgggcagaattgctcgccgactgccagttgctctacaccctgagcatcggtggcccggcggcggccaaggtggtgcgtgccggggtccatcccgtgcgcctggcccgggccaggccggcccgcgagatcgtcgaggagctgcagcgggtgctggccaccgcgccgcccccctggctggccaaggccatgggtgccgagccagaccagcgcatacgtttcacccagtaaccgctccggatgaggacacagccatgatcagccaaacacttctcgacgatgtcgttcgccaggccgaacagggagtgctgggcgaaagcctactcgccagcctgcgcagcgcccatccgggggtgcacttcacctgctgcatggacgacgacgtcgtggtcaacgccaagccggtcgtcgagcgtccgggcttcaacgtctatctggtcaactcctgcgaccactgctcggtgctgaccaacgatctggactccgcttccggcattgtcctggcggaaatcattgaggattgaggtacgcatggccgacgatcgaggcgacatcacccccatcggcgattgccgggtctgcagcttccgcatgagcctgctgctgaccggccgctgtacgccgggcgacgcctgcgtggcggtggagagcggacggcagatcgaccgtttcttccgcaataacccgcacttggccgtgcagtacctggccgatcccttctgggagcgccgcgccatcgccgtgcgctattcgccggtggaggcgctgaccccgttgattcgcgacagcgacgaggtggtgcgtcgggccgtcgcctaccggctgccccgcgagcagttgagtgcgctgatgttcgacgaggaccgcgaggtgcgcatcaccgtggccgatcgcctgccgcttgagcaactggagcagatggccgccgacagggattatctggtgcgcgcctatgtagtccagcgtatccctccggggcgcctgttccgtttcatgcgcgacgaggaccgccaggtgcgcaagctggtggccaagcgcctgcccgaggaaagcctgggtctcatgacccaggacccggagcccgaagtccggcgcatcgtcgcctcgcgcctgcgcggcgacgatttgctggagctgttgcacgacccggattggacggtacgcctggccgccgtggagcatgcgtcgctggaggcgctgcgtgaactcgacgagcccgatcccgaggtccgcctggcgatcgccgggcggctcggcatcgcctgatccccgcgtctgacgggcggaacggtttcgccggccgccccgccccccgcattgcccttcgtacccttgtcacctttcgcccagcgttgacgtgaatgcccgatgccggacgcctgcttgttgcaaacctgacaggaaggcgcgtttatgacaaaggctccccttggtaaacccttttaaatcaggcgcttgccttctggtacaggcattgcaatgatccgttgcaacatgctgcatcaacgaccagaggggtacgcgatgaaagccaaggatattgccgaactgctcgacgagcccgcctgcagtcacaacaagaaggaaaagtccggctgcgccaagcccaagccgggcgccaccgacggtggctgctccttcgacggcgcgcagatcgccctgctgcccgtcgccgacgtggcgcatatcgttcacgggccgatcgcttgcgccggcagttcctgggacaaccgcggcacccgctccagcgggccggacctgtaccgcatcggcatgaccaccgatctcaccgagaacgacgtgatcatggggcgcgccgagaagcgcctgttccatgccatccgccaggcggtggaaagctattcgccgccggcggtgttcgtctacaacacctgcgtgccggcgctgatcggcgacgacgtcgacgcagtgtgcaaagccgccgccgagcgcttcggcaccccggtcatcccggtcgactcggccggcttctacggcaccaagaacctcggcaaccgcatcgccggtgaggccatgctcaagtacgtgatcggcacccgcgagcccgatccgctgcccgtcggcagcgagcgtccgggcatccgcgtgcacgacgtcaacctgatcggcgagtacaacatcgccggcgagttctggcatgtcctgccgctgctcgacgaactgggcctgcgggtgctctgcaccctggccggcgatgcgcgctaccgcgaggtgcagaccatgcaccgcgccgaagtgaacatgatggtctgctccaaggccatgctcaatgtcgctcgcaagctgcaggaaacctacggcacgccctggttcgagggcagcttctacggcatcaccgacacctcccaggcgctgcgcgacttcgcccggctgctcgatgatcccgacctgaccgcccgcaccgaggcgctgatcgcgcgcgaggaggccaaggtccgcgccgccctcgaaccctggcgtgcgcgtctggagggcaagcgcgtgctgctctacaccggcggcgtgaagtcctggtcggtggtttccgccctgcaggacctgggcatgaaggtggtcgccaccggcaccaagaagtccaccgaggaagacaaggcacgcatccgcgaactgatgggcgacgacgtcaagatgctcgacgagggcaatgcgcgggtgctgctgaagaccgtcgacgagtaccaggccgacatcctcatcgccggcggacgcaacatgtacaccgcgctcaagggccgcgtgcccttcctcgacatcaaccaggagcgcgaattcggctatgccggctacgacggcatgctggaactggtgcgtcagctctgcatcaccctggaatgcccggtgtgggaggcggtgcgccgccccgcgccctgggacatccccgccagccaggacgccgcgccgagcgcgccggcccgttcggcgaacgcctgaggagaaccgcgatggccgagatcatcaatcgcaacaaggccctggccgtcagcccgctgaaggccagtcagaccatgggcgccgcgctggccatcctcggcctggcgcgcagcatgccgctgtttcacggctcgcagggttgcaccgcgttcgccaaggtgttcttcgttcgccatttccgcgagccggtcccgctgcagaccaccgccatggaccaggtcagttcggtgatgggcgccgacgagaacgtcgtcgaggcgctgaagaccatctgcgaacggcagaatccctcggtcatcggcctgctcaccaccggcctgtcggaaacccagggctgcgacctgcacaccgccctgcacgagttccgtacccagtacgaggagtacaaggacgtgccgatcgttccggtgaacacgccggacttcagcggctgcttcgagagcggcttcgccgcggcggtcaaggcgatcgtcgagacgctggtgcccgaacggcgcgatcaggtgggcaagcgtccgcgccaggtcaacgtgctgtgctcggccaatctcaccccgggcgatctggagtacatcgccgaaagcatcgagagcttcggtctgcgccccttgctgatccccgacctgtccggctcgctcgacggccacctggacgagaaccgtttcaatgccctgaccaccggcggactgagcgtggccgaactggccaccgccggacagagcgtcgccactctggtggtcgggcagagcctggcgggtgcggccgacgccctggccgagcgcaccggcgtgcccgaccggcgcttcggcatgctctacggtctggatgcggtcgatgcctggctgatggcgctggccgagatcagcggcaatccggtgcccgaccgctacaagcgccagcgtgcccaattgcaggacgccatgctcgacacccacttcatgctcagttccgcacgcacggccatcgccgccgatcccgatctgctgctcggtttcgatgccctgctgcgcagcatgggcgcgcacacggtagccgccgtggtgccggcccgggccgccgcgctggtcgattcgcctctgccctccgtgcgggtcggcgacctggaggacctcgagcatgccgcccgcgccggccaggcccaactggtgatcggcaacagccacgccctggccagcgcccgtcgcctcggtgtgccactgttgcgtgccggcttcccgcagtacgatctgctgggcggtttccaacgctgctggtccggctaccgcggcagcagtcaggtgctgttcgatctggccaacctgctggtcgaacaccaccagggtatccagccctatcattcgatctatgcgcaaaaaccggcaaccgaacagccgcaatggaggcactgaagcgatgtccagcccgacccgacaattgcaggtattggatagcgaggacgacggcaccctgctgaaggtcgccttcgcctcgtccgaccgcgaactggtcgaccagcatttcggctcctcgcgctccttcgccatctacggggtcaatcccgagcgctcccagctcctctcggtcgtcgagttcggcgagctggagcaggacggcaacgaggacaagctggccaggaagatcgatctgctcgacggctgcgttgccgtgtactgttgcgcctgcggcgcctcggcggtgcgccagttgatggccatcggcgtgcagccgatcaaggtgagcgaaggcgcgcgcatcgccgagctcatcgaagccctccaggtcgagttgcgcgaaggtccttcggcctggctggccaaggccatccagcgtacccgcggccccgacatgaggcgcttcgacgccatggccgccgaaggctgggacgaatagataattcgagttgcaggaaggtagcacccggaattgtgagcggataacaattccttggaattgtgagcggataacaattataattaagttgttaggagggaacttagatgtgggattattcggaaaaagtcaaagagcacttctacaaccccaagaatgctggagccgtggaaggcgccaacgccatcggcgacgtcggatcgctgagttgcggtgatgcgctgcgcctgaccctgaaggtggacccggaaaccgacgtgattctggatgccggcttccagaccttcggctgtggttccgccatcgcttcctcctcggcgctgaccgagatggtcaagggcctgaccctggacgaggcgctgaagatcagtaaccaggacatcgccgactacctcgatggcctgccgccggagaagatgcactgctcggtgatgggccgcgaagccctgcaggccgcggtggccaactaccgtggcgagacgatcgaggacgaccacgaagagggcgcgctgatctgcaagtgcttcgccgtcgacgaggtgatggtccgcgataccatccgtgccaacaagctgtctaccgttgaggacgtgaccaattacaccaaggccggcggtggctgctccgcctgccacgaggctatcgagcgcgtgctgaccgaagagctggccgctcgcggtgaagtcttcgtcgcggccccgataaaggccaagaagaaggtcaaggtgctcgcccccgagccggctcccgccccggtggccgaagccccggcggctgccccgaagctgagcaacctgcagcgcatccgtcgcatcgagaccgtgctggcggcgatccgtccgaccttgcagcgcgacaagggcgacgtcgaactgatcgatgtcgacggcaagaacgtttatgtcaagctcaccggcgcctgcaccggctgccagatggccagcatgaccctcggcggcatccagcagcgcctgatcgaggagctcggcgagttcgtcaaggtgattccggtcagcgctgcggctcacgcgcagatggaggtctgaaatggctgacgtctatctcgataacaacgccaccacccgggtggacgacgaaatcgtccaggccatgctgccgttcttcaccgaacagttcggcaacccctcgtcgctgcacagcttcggcaaccaggtcggcatggcgctgaagaaggcccgccagagcgtgcagaaactgctcggtgccgaacacgattcggaaatcgtcttcacctcctgcggcaccgagtcggactccaccgcgatcctctcggcgctcaaggcccagcccgaacgcaagaccgtcatcaccaccgtggtcgaacacccggccgtcctcagcctgtgcgattacctcgccagtgagggctacaccgtgcacaagctgccggtggacaagaaaggccgtctggatctggagcattacgccagcctgctgaccgacgatgtcgccgtggtgtcggtgatgtgggccaacaacgagaccggtaccctgttcccgatcgaagagatggcgcgcctggccgacgacgccggcatcatgtttcacaccgatgccgtgcaggccgtgggcaaggtaccgatcgacctgaagaattcgtcgatccacatgctttcgctgtcgggccacaagctgcacgcgcccaaaggtgtcggcgtgctctatctgcgccgcggcacccgcttccgtccgctgctgcgcggtggtcaccaggagcgcggccgtcgtgccggcaccgagaacgccgcctccatcatcggcctgggtgtcgccgccgaacgcgcgctgcagttcatggagcacgagaacaccgaggtcaagcgcctgcgcgacaagctggaggccggtatcctcgccgtcgtgccccatgccttcgtcaccggcgatccggacaaccgcttgcccaacaccgccaacatcgcgttcgagtacatcgagggcgaggccatcctgctgctgctgaacaaggtcggcatcgccgcctccagcggttcggcctgcacctccggctccttggagccctcccacgtgatgcgcgccatggacattccctatactgccgcccacggcaccgtgcgcttctccctgtcgcgctacaccaccgaggaggagatcgaccgggtgatccgcgaggttccgccgatcgtggcccagttgcgcaagctgtcgccctactggagcggcaacggtccggtggaggacccgggcaaggccttcgctccggtctacggctgagtcgccgccgtcctgcgggagcgtatcccgcgggaaatcgtccccaccccgcccgagttgttggagaaagccatggctagcgtgatcatcgacgacactaccctgcgtgacggtgaacagagtgccggggtcgccttcaatgccgacgagaagatcgctatcgcccgcgcgctcgccgaactgggcgtgccggagttggagatcggcattcccagcatgggcgaggaagagcgcgaggtgatgcacgccatcgccggtctcggcctgtcgtctcgcctgctggcctggtgccggctatgcgacgtcgatctcgcggcggcgcgctccaccggggtgaccatggtcgacctttcgctgccggtctccgacctgatgctgcaccacaagctcaatcgcgatcgcgactgggccttgcgcgaagtggccaggctggtcggcgaagcgcgcatggccgggctcgaggtgtgcctgggctgcgaggacgcctcgcgggcggatctggagttcgtcgtgcaggtgggcgaagtggcgcaggccgccggcgcccgtcggctgcgcttcgccgacaccgtcggggtcatggagcccttcggcatgctcgaccgcttccgtttcctcagccggcgcctggacatggagctggaagtgcacgcccacgatgatttcgggctggccacggccaacaccctggccgcggtgatgggcggggcgactcatatcaacaccacggtcaacgggctcggcgagcgtgccggcaacgccgcgctggaagagtgcgtgctggcgctcaagaacctccacggtatcgacaccggtatcgatacccgcggcatcccggccatctccgcgctggtcgagcgggcctcggggcgccaggtggcctggcagaagagcgtggtcggcgccggggtgttcactcacgaggccggtatccacgtcgacggactgctcaagcatcggcgcaactacgaggggctgaatcccgacgaactcggtcgcagccacagtctggtgctgggcaagcattccggggcgcacatggtgcgcaacacgtaccgcgatctgggtatcgagctggcggactggcagagccaagcgctgctcggccgcatccgtgccttctccaccaggaccaagcgcagcccgcagcctgccgagctgcaggatttctatcggcagttgtgcgagcaaggcaatcccgaactggccgcaggaggaatggcatgagtctgcttacgcaatggcgtgatgacatccgctgcgtcttcgagcgcgacccggcggcacgcaccaccttcgaggtgctcaccacctatccgggggtgcacgcgatcatcggctaccggctggccaatcgcctgtggcgtgccggctggcgctatccggcacgtctgctgtcgttcgtcgcccgcatgctgagcaacgtggacattcacccgggggcgaccatcggcgagcgtttcttcatcgatcacggcgcctgcgtggtgatcggcgaaaccgccgagatcggcaacgacgtgaccctctaccatggcgtgactctcggcggcaccagttggaacaagggcaagcgccatccgacgctgagggacggcgtgctggtgggcgcgggagccaagattctcggtcccatcaccgtgggcgcgggcgcccgggtgggggccaactccgtggtggtccaggatgtgccggacggttgcaccgtggtcggcatccccggcaaggtagtcaaggtgcgcgaggccggccgcccgaatccctatggcatcgacctcgaccatcacctgattccggacccggtgggcaaggccatcgcctgcctgctggagcgcatcgatgcgctggagaagcaggtcgaggcgggtgggctggtcaccgtcggcagccagcagcagttctaccaggtctgtaactccgacaacagcatttgcgagagcgactgcgccggtggcaccactgcgcaggctcaacaatcggccggtcgccgtcgggccgtacccactccggtggccgagtgatcgctggaaccacgggagacgactgagcatggacctgcaggacttcgacagcgacagcctgtactacgacgagccgctcgccccggaggtagcggcccgtctggccgcggccgccgaacagtatgccgagggcaccgccgagcagccgctgctcgaggcacaggccctcgccccggacgatctgacggtgctggtcggcctgtatcgcttctatttctaccagcaccgctatcaggacgctctgcagatcgcctggcgggtactggaggtggtcggtccccggctgctgctgcccgcggactggcgcgcgatcgatgccgggtatctcgcggcggcatccgagcggggcatcgcgctcctgcgtttctatctgctggcgctcaagggtgccggctatctgaacctgcgtctgggccggttcgagcagggcaaggccatgctcgccaaggtcgtcgagctggacacggaaaaccgcctgggagccaggctgttgttggacgtgctggccgaacacagcgctgaaatcctgattttccccactgcggccaacgcggagataagaccatgaccgtgcaacccttttccccggattccgacctgaccctggacgaggccatggacgagctggtctcggccgaggacttcctcgagttcttcggtgtgcccttcgatcaggatgtcgtgcatgtcaaccggctgcacatcatgcaacgctaccacgactacctgagcaaggccggcgatctggacgagcacgacgaccaggcccgctacgcggtgttccagaagctgctggcgcgcgcctatctggacttcgtcgagtccgatgccctgaccgagaaggtcttcaaggtgtttcgcatgcacgaaccgcagaagaccttcgtttccatcgaccaactgttgagctgagcttaagaggggaggcgccatgctgccgcagtttgaatatggtgatgaggttcgcctgattcgcaacgtgcgtaacgacggcacctatccgggcatgaataccggcgccctgctgatgcgccgtggcgcggtgggttgcgtctatgacgtcggtacttatctgcaggatcaattgatctatcgcgtgcacttcctcgacgaaggacgcaccatcggctgccgcgaggaggagctgatcctcgcctcggctccctggattcccaaccttttcgagttccgcgacgatgtgatcgccacccgcagtcttgccgtgcgcggccaggtgctggtgaagcgtggccagctcggcagcatcatgaaggtgctgcgcgacgagcccgagctcggcatccagtaccatgtccacttcggcgacggtctggtattgcaggtgcccgagcagagcctggcgatggccgactccacggcggccatcgaggaggtgctcgatggcatctgagcgtctcgccgacggcgacagccgctattacttgctgaaggtcgcccacgagcagttcggctgcgcgcccggcgagctcagcgaggagcagctccagcaggccgaccgcatcatcggccggcagaggcatatcgaggacgccgtgttgcgcagccccgatgcgatcggtgtggtgatcccgccctcccagctcgaagaggcctgggcacacatcgccagccgctacgagagtcccgaggcgctacagcaggccctcgacgcgcaggcgctggatgctgccggcatgcgcgccatgctggcccgggagctcagggtcgaggccgttctcgactgcgtctgcgccggcctgccggagatcagcgacaccgatgtgagcctctactacttcaaccacgccgagcaattcaaggtgcccgcccagcacaaggcccggcacatcctggtcaccatcaacgaggattttccggaaaacacccgcgaagccgcccggacgcgcatcgagaccatcctcaagcggctgcgcggcaagccggagcgcttcgccgagcaggcgatgaagcactccgaatgtcccaccgcgatgcagggcggattgctcggcgaggtggtcccgggaacgctttatcccgaactggacgcctgcctgttccagatggcgcggggagaactgagtccggtactggaatcgccgatcggttttcacgtgctgtactgcgaaagcgtgagccccgcccggcagctcaccctcgaggagatcctgccgcgtctgcgcgacaggctgcagctccggcagcgcaaggcgtatcagcgcaaatggctggaaagcctgctccaacaaaacgctactttggagaacctcgcccatggataaaacggacaaaccctgctgctcgttctgcggcgcggagaagagcccgaccgttccgctgatcgccggcaacgacgggcgaatctgcgaagcctgcgtcaagcttgcccatcaggtggtcagcagctgggggcagcggcgcaagaaccagcagctggctccgcagctacgcacccccgtggaatacaagaagcacctggacgagtcggtgatcggtcaggaggcagccaaggagaccctgtcggtcgcggtctacaaccactacctgcgcttgctcaactgcgatcgcgaaccggtctgccaactgggcgagcaggtcgaactggagaaatccaacatcctcatggccggcccttcgggtaccggcaagaccctgctggtgcgtaccctggcgcgcattctcggggttcccttcgccatggccgatgccaccaccctgacccaggccggctatgtcggcgatgacgtcgacagcatcatcacccgtctgctcgatgcggccggcggcgacgtgcagcaggcgcagtggggcatcgtctatatcgacgaggtggacaagctggccaagcgcagcgggggcggtacggcggtgcgcgacatctccggcgaaggggtacagcaggccctgctgaagatggtcgaaggcaccgaggtgcgcatcagcaagtccgggcgacgcaacgagcacagcgaggagcaggtggtggacacccgcaatatcctgttcatcgccggcggtgccttccccgggttggaagcactggtctcgagccgcatccagccgaagaacaccggtatcggtttccatgcccagccgcgtcgggaggccccttcgatcaacgagctgatggcctcgctgctaccggacgacctgcacgagttcggcctgattcccgaattcatcggtcgtttcccgatcatcaccttcctgcaggaactcgaccacgccaccctgctgcgtatcctcaccgagccgcgcaatgcactggtcaaacagtacaagcagttgttcgcctatcagggcgtcgaactggtgatcaccgatgcggccctcaactacatcgccgaccaggcgctgattcgcaagaccggtgcccgcggattgcgcgctgtactggaagccgccctgcagcagaccatgttcaacatgccctcgcagccacaactgcgcggttgtacgctggatctggtcgagcatgaggatggcggccgctctctggaggttctgacccgactggccgaagatggcagcggacggattcagcccgatccatctccggtagtggaggaaaaatccgcgctgtcggccgacctctgaggaggtcgtaaagaactgttgtaaaaacgacaaggcctgcctgcccgccccattcttatcgtcgcatttgcgacaggattttttactgccataaaaaatgcttttaaatcaataagttggtaaatgtgttcggggtttggggagtggtctgcttcttgctgttactcaccggccagccaggtgtacaagcccggagactggcgctccgaccacgaatctcatgcatgcagccagaggttaagttatggccaagattggactcttcttcggtagcaacaccggtaaaacccgcaaggtcgccaagtcgatcaagaagcgtttcgacgacgaaaccatgtccgatgcgctgaacgtcaaccgtgtttccgcggaagacttcgcccagtaccagttcctgattctgggtactccgacccttggcgaaggcgaactccccggtctgtcctccgactgcgaaaacgaaagctgggaagaattcctgccgaagatcgagggcctggatttcagcggcaagaccgtggcgctgttcggcctgggcgatcaggttggctatcccgagaattacctggatgccctgggcgaactgtattccttcttcaaggaccgtggcgccaagatcgtaggctcctggtcgaccgacggctacgagttcgaaagctccgaggccgtggttgacggcaagttcgtcggcctggcgctggatctggacaatcagagcggcaagaccgacgagcgcgttgctgcctggctggcacagatcgctcccgagttcgggctgtccctgtaacggcaaacgagtgaaggaactagcacccggaattgtgagcggataacaattccttggaattgtgagcggataacaattataattaagttgttaggagggaacttagatgattataaaaaagaatcactttgatttagacaaattctttatatgctttttttcaatattcgtaataatatatttagttattttatgtttccctattgtttctgtcgtaaaatattctggaatatctaacataatatccacacttcaaaatcacgaaagtttatccgcaataaagctgagttttcaaacttctttgacatcactgcttcttacttttattcttggtactccaactgtatttttcatagttcttaataagaaacaccttttagcaaagttagttgatttaattatagaaatccctatcactcttccgccagctgctgctggaattgcactccttctcgcatttggtaaaaatggcttactaaaaaatttgttttctatttacaatatacaacttacttttactcccatagcagttataatagctcaattttttgtttcttctatatactatatacaggttttggaaacttctctttcagcagtcccaattgaaatttttgaagcttcatatgtatcaggctgtggcaaagtaggaacagccattagagttattattcctatgttaaaaaaatcaataatatcaggattaattttaacttggattagatctatgggcgagtttggtgcaacaattgtatttgctggaaacgtacttggcaaaacaacaactatgcctcttttcatctacactttaatgcaaacaaacatagttaaagctgctgctttttctctggtgctttatataatttcctttataatactacttttaattaaaacctggtgttctaacaatgattagggagacaacggatggcaaaaaagttgaaaaccatggatggaaatgaagctgcagcttacgcttcttatgcctttacagatgtagctgcaatttatcctataacaccatccactccaatggcagagctagttgataactggtcatctcatggaagaaaaaacatcttcgggcagcctgttaaaatagttgaaatgcaatcagaggctggtgcagctggaactgttcacggttccttgattgcaggtgcacttacaactacatacactgcttctcaaggtcttcttttaatgataccaaacatgtataaaatggctggagaacttctaccctgcgtattccatgtaagtgctcgtgctattgcaactcacgctttatctatatttggagaccatcaggacgtcatggctgcaagacaaacaggttttgttctcttagcctcttcaaacgttcaagaggtcatggatttagctatggtatcacacttagctgctattaaagcaagagtgccattcatgcacttctttgacggttttagaacatcacatgaatatcaaaaaatagaaatgattgattacaatgatgtagctcctctagttgactacgaatcaattaaggcttttaggtctagagctcttaacccagaacatcctactgttcgtggtacagctcaaaatcctgatatctacttccagggcagagaagcttcaaacaatttctacactgcagttcctgatatcgtagaaagctatatgagagaaatagaaaagataactggaagagtatatcatccttttgattactatggcgaccctgaagcagaggatataattattgccatgggttcagtttgtgatacagttgaggaaactgtagattatttaaggagtaagggacaaaaagttggattgttgaaggttcatttatatagaccattctctactgactacttctttaaatatcttcctaaaactattaaaagaattgcagttctagacagaacaaaggaacctggttcagccggagaacctctttatctagatgtagttaatgccttttataaccatccaaataaacctgtcatagttggaggacgttttggtttaggttctaaagacacacgaccatcacaaattttatctgtatttgataacttaagagctcaaagccctaaaaatagatttaccattggaattgtggatgatgtttcaaatacatctctacctgaaggtgaaataatcgatactacacctcaaggaactataagatgtaaattctatggtttaggctctgatggtacagttggtgcaaacaaaagtgctataaaaatcataggtgataataccgatatgtactgtcaggcttacttctcctatgacagtaaaaagtctggaggaagtactgtttctcacttaagattcggaaataaacctattaaatccccttatcttgtttatgaagcagactacattgcctgccacaataaatcctttatatataatataaatgtgttaaaaggattaaagaagaacggaatttttgttctcaactgtccatttaaagataacgaacttgatgaacatcttcctaatgcaatgaaaaaatatattgcagacaacaacatacaattttacaccatagacgcagtttcaatagctcaagaggtaggtcttggttctagaataaacatgattatgcagtctgctttctttaaactagctaacataataccagtggataaggctgttcagtatttgaaagattctatagaatacacttacggtaaaaaaggtgctactatagttgatgcaaataaaaaagctgtagatgccggagttaacgcagctcacaaagttactgttcctgaagcctggaaaaatgctgaatccaactatcaacctttaaaaggtcttcccgatttcgttcaaagaattgaaagacctatggcaaggcatgaaggtgacgaactacctgtaagtgcttttaaaggcatggaagatggtgtatttcctcttggtataaccgcttatgaaaagcgtggaattgcagttaacgtcccagaatggcaaatagacaaatgtattcaatgtaaccagtgtgcatatgtttgtcctcacagtgtaataagagcttgtttacttgatgatgaggaaaaagaaaatgctcctgaaagattcgttaccaagaagcctgtaggtaaaggcctcgaacacctacactacaaaatccaaataagtccacttgactgtactggttgcggaaattgtgcggatatatgtcctgctccaggtaaagctttaattatgaagcctgctgcagaacaaatagaagaacaatcagaaaacttcgaatatgccttaaaggtaaaacctaaggaaggtataatggatattcatactgtaaagggaagtcaattttctagaccacttctagaatttaacggagcttgtcccggctgtggtgaaacaccttatattaaactattaacacagctttatggagatagaatgatgatagcaaacgctactggatgctcatctatttggggtgcaagtgcaccttcaattgcatacaccacaaataacttcggaaaaggtccttcttggggtaactcattatttgaggataatgcagagtacggttacggaatgtttttaggcgttaagcaaatgagagaaagattggctgaactaatggaagaagctattaattcaaatataaattctgatcttaaggatgcttttagcttgtggctagatggctttgatgacggcgataaatccaaggaagcatcaaataaaatccttagaatcatggaaaacgaggacttcaagggtgataaattattatctgaaatatatgataagaaagattatttagttaagaaatcccactggttaattggaggagacggttgggcatatgatataggcttcggcggagtagatcaagtgcttgctttaggtgatgatgtaaatatatttgtaatggatactgaaatatactctaatactggtggtcaatcctcaaaatccacaccaactggagcaattgcaaaattcgcttcagcaggtaaaaaaacacgaaaaaaagatcttggcttaatggctatgacttatggaaatgtctatgtaactcaaatagctatgggagcaaacatgacccacactattaaagcaattactgaagccgaagcctacaaaggtccttctttagtaatagcttatgcaccatgtataagccacggtattaaaactggtatgggcaccagcatagctcaagagaaaaaagctgttgaagcaggatactggcatttatacagatacaatcctcttctaaaagagcagggaaaaaatccatttatacttgattcaaaagagccaacagaatcctatacagactttataaatggagaacttcgttactcttcacttaagactatcttccctgataaggttgaagatgcatttaataagtcagcagaaaatgcaaaggaaagatactctctttataaaaaattatcagaattacagtaactttgcctccttccgttcatccttgccggaaacctctcccatgcgaatcgccctggcccccatggagggattggtcgacgaactgcttcgtgacttgctgacccgcgtcggcggtatcgactggtgcgtgaccgaattcgtccgggtctgcgaccgtctgctgccggtcgcccagttcgagaaactggctccggagctgcggcatggctggcggacccgggccggcacgccgatgcatctgcaactgctcggttccgatccggcatgcctggccgagaacgcggcgctggcggccgaattgggcgcgccggcgatcgatctcaacttcggttgcccggcgaagacggtcaaccgctcgcggggcggagcggtgctgctcgacgagccggaactgctgcatgccatcgtccgcgaggtgcgccgggccgtgccggcgcatgtgccggtgaccgccaagatgcgcctggggtacgcccggcccgagggcgccctggagtgcgcccgcgcgctggtcgagggcggcgtcgcacatctggtggtgcacgcacggaccaaggtcgagggctaccggccgccggcccattgggaatggctggcgcgggtgcgggaggcggttgccgtgccggtctatgccaacggcgaaatctggacgccggcggattggctgcgctgccgggaaatcagcggggtggaggatgtcatgctcggccgcggcctggtttcgcgccccgatctggcccggcagatcgccatggcgtgcgccggacgcacgctcgagccgcagggctggggtgaggtacagccgctggtgcgcgagttctggcggcgcgcccggcagcggatcgcgccgcgctacgcgcctggccggctcaagcagtggctgggcatgctggcgcgcagttatccggaggcggccgcgctgttcgccgaactgcgccgggagaacgactgcgggcggctggatgccctgctgggcgtagagttgcgcggtattttcccggatctgtgtccggcgctctgaatgtgagcaataaaaataagaagcctgcatttgcaggcttcttatttttaaggccagcaaaaggccaggaaccgtaaaaaggccgcgttgctggcgtttttccataggctccgcccccctgacgagcatcacaaaaatcgacgctcaagtcagaggtggcgaaacccgacaggactataaagataccaggcgtttccccctggaagctccctcgtgcgctctcctgttccgaccctgccgcttaccggatacctgtccgcctttctcccttcgggaagcgtggcgctttctcatagctcacgctgtaggtatctcagttcggtgtaggtcgttcgctccaagctgggctgtgtgcacgaaccccccgttcagcccgaccgctgcgccttatccggtaactatcgtcttgagtccaacccggtaagacacgacttatcgccactggcagcagccactggtaacaggattagcagagcgaggtatgtaggcggtgctacagagttcttgaagtggtggcctaactacggctacactagaagaacagtatttggtatctgcgctctgctgaagccagttaccttcggaaaaagagttggtagctcttgatccggcaaacaaaccaccgctggtagcggtggtttttttgtttgcaagcagcagattacgcgcagaaaaaaaggatctcaagaagatcctttgatcttttctacggggtctgacgctcagtggaacgaaaactcacgttaagggattttggtcatgagattatcaaaaaggatcttcacctagatccttttaaattaaaaatgaagttttaaatcaatctaaagtatatatgagtaaacttggtctgacagctcttcctttttcaatattattgaagcatttatcagggttattgtctcatgagcggatacatatttgaatgtatttagaaaaataaacaaataggggttccgcgcacatttccccgaaaagtgccacctg

SEQ ID NO: 2 - DNA, 17510 bp, artificial sequence
  plasmid SG211
acggtcctgcatcagctcttatatattaagctaccaacttagtatataagccaaaacttaaatgtgctaccaacacatcaagccgttagagaactctatctatagcaatatttcaaatgtaccgacatacaagagaaacattaactatatatattcaatttatgagattatcttaacagatataaatgtaaattgcaataagtaagatttagaagtttatagcctttgtgtattggaagcagtacgcaaaggcttttttatttgataaaaattagaagtatatttattttttcataattaatttatgaaaatgaaagggggtgagcaaagtgacagaggaaagcagtatcttatcaaataacaaggtattagcaatatcattattgactttagcagtaaacattatgacttttatagtgcttgtagctaagtagtacgaaagggggagctttaaaaagctccttggaatacatagaattcataaattaatttatgaaaagaagggcgtatatgaaaacttgtaaaaattgcaaagagtttattaaagatactgaaatatgcaaaatacattcgttgatgattcatgataaaacagtagcaacctattgcagtaaatacaatgagtcaagatgtttacataaagggaaagtccaatgtattaattgttcaaagatgaaccgatatggatggtgtgccataaaaatgagatgttttacagaggaagaacagaaaaaagaacgtacatgcattaaatattatgcaaggagctttaaaaaagctcatgtaaagaagagtaaaaagaaaaaataatttatttattaatttaatattgagagtgccgacacagtatgcactaaaaaatatatctgtggtgtagtgagccgatacaaaaggatagtcactcgcattttcataatacatcttatgttatgattatgtgtcggtgggacttcacgacgaaaacccacaataaaaaaagagttcggggtagggttaagcatagttgaggcaactaaacaatcaagctaggatatgcagtagcagaccgtaaggtcgttgtttaggtgtgttgtaatacatacgctattaagatgtaaaaatacggataccaatgaagggaaaagtataatttttggatgtagtttgtttgttcatctatgggcaaactacgtccaaagccgtttccaaatctgctaaaaagtatatcctttctaaaatcaaagtcaagtatgaaatcataaataaagtttaattttgaagttattatgatattatgtttttctattaaaataaattaagtatatagaatagtttaataatagtatatacttaatgtgataagtgtctgacagtgtcacagaaaggatgattgttatggattataagcggccggccagtgggcaagttgaaaaattcacaaaaatgtggtataatatctttgttcattagagcgataaacttgaatttgagagggaacttagatggtatttgaaaaaattgataaaaatagttggaacagaaaagagtattttgaccactactttgcaagtgtaccttgtacctacagcatgaccgttaaagtggatatcacacaaataaaggaaaagggaatgaaactatatcctgcaatgctttattatattgcaatgattgtaaaccgccattcagagtttaggacggcaatcaatcaagatggtgaattggggatatatgatgagatgataccaagctatacaatatttcacaatgatactgaaacattttccagcctttggactgagtgtaagtctgactttaaatcatttttagcagattatgaaagtgatacgcaacggtatggaaacaatcatagaatggaaggaaagccaaatgctccggaaaacatttttaatgtatctatgataccgtggtcaaccttcgatggctttaatctgaatttgcagaaaggatatgattatttgattcctatttttactatggggaaatattataaagaagataacaaaattatacttcctttggcaattcaagttcatcacgcagtatgtgacggatttcacatttgccgttttgtaaacgaattgcaggaattgataaatagttaacttcaggtttgtctgtaactaaaaacaagtatttaagcaaaaacatcgtagaaatacggtgttttttgttaccctaagtttgttaagggatgcataaactgcatcccttaacttgtttttcgtgtacctattttttgtgaatcgattatgtcttttgcgcattcgtcgacaattgcatatattgataaaaataataatagtgggtataattaagttgttaggaggttagttagagtgaaaccagtaacgttatacgatgtcgcagagtatgccggtgtctcttatcagaccgtttcccgcgtggtgaaccaggccagccacgtttctgcgaaaacgcgggaaaaagtggaagcggcgatggcggagctgaattacattcccaaccgcgtggcacaacaactggcgggcaaacagtcgttgctgattggcgttgccacctccagtctggccctgcacgcgccgtcgcaaattgtcgcggcgattaaatctcgcgccgatcaactgggtgccagcgtggtggtgtcgatggtagaacgaagcggcgtcgaagcctgtaaagcggcggtgcacaatcttctcgcgcaacgcgtcagtgggctgatcattaactatccgctggatgaccaggatgccattgctgtggaagctgcctgcactaatgttccggcgttatttcttgatgtctctgaccagacacccatcaacagtattattttctcccatgaagacggtacgcgactgggcgtggagcatctggtcgcattgggtcaccagcaaatcgcgctgttagcgggcccattaagttctgtctcggcgcgtctgcgtctggctggctggcataaatatctcactcgcaatcaaattcagccgatagcggaacgggaaggcgactggagtgccatgtccggttttcaacaaaccatgcaaatgctgaatgagggcatcgttcccactgcgatgctggttgccaacgatcagatggcgctgggcgcaatgcgcgccattaccgagtccgggctgcgcgttggtgcggacatctcggtagtgggatacgacgataccgaagacagctcatgttatatcccgccgttaaccaccatcaaacaggattttcgcctgctggggcaaaccagcgtggaccgcttgctgcaactctctcagggccaggcggtgaagggcaatcagctgttgcccgtctcactggtgaaaagaaaaaccaccctggcgcccaatacgcaaaccgcctctccccgcgcgttggccgattcattaatgcagctggcacgacaggtttcccgactggaaagcgggcagtgagcgcaacgcaattaatgtaagttagctcactcattaggcaccgggatctcgaccgatgcccttgagagccttcaacccagtcagctccttccggtgggcgcggggcatgactagcatgatcgtgctcctgtcgttgaggacccggctaggctggcggggttgccttactggttagcagaatgaatcaccgatacgcgataacttcgtataatgtatgctatacgaacggtagctcagctagcacccggaattgtgagcggataacaattccttggaattgtgagcggataacaattataattaagttgttaggagggaacttagatgtccaatccgccgctggataccgaggaaaacgcaaccaccctcgcgataacgcccatccccgccgaatccctgccgctggtgcgcgaaaccgtcgagcgcctgcgcccgggcgtgcagcgcgacggtggcgacctggagctggtcgccgtacaggacaacatcgtccgcctgcgcctcaagggcgcctgcgtcggctgcgccatgtccgcccagacgctcggcggcgtgcgccgcgaactggtcaaggtgctcgacaatccctcggtgcgcgtactgccggccccctgagtagagtcccatgcgccagacagaacgccagacaggagtggtcattcccatgtccagcctcccccaatactgcgaatgcggcctcggcgagtgccgtacggacgtgttgccgctgctctacgaaatgagccagatcgccacggaaagcggcgatctgtcgagcatcatcagcatcctgctgcgcctgatgaagcgccacatgaaagtggtgcgcggcatggtcaccctctacgaccgggactccggcagcatcgtcctgcacgagagcttcggcctcagccccgaagaggccggcaagggcgtctatctgctcggcgaaggcatcatcgggcgggtggtggaaaccggccagagcatcgtggtgccctgcatccgcgacgagccggcgttcctcaaccgcaccggcagccgcgactgcgacagcgacgacgccaacctgtcgttcatctgcgtgccgatcctgcgcggtcgccaggtgatgggcacgatcagcgccgagcgtctctacgacaacgccgaactgctcaagctggacgtcgaggtgctgtcgatcctggccaccaccaccgcccaggcggtcgaactgtacttggtggagaacgtcgagaacgtcgccctggaggcggagaaccgtcgcctgcgcagcgccctgggggagcgcttcaagcccgccaacatcatcggcaattccaagccgatgctcgaggtctatcaactgatcgagcgcgtggtgcgtaccaggaccacggtgctgatcctcggcgagagcggcgtcggcaaggagctggtggccggcgccatccactacaacagcccggcggccaaggggccgttcgtcaagttcaactgcgcctcgctgcccgaatcggtcatcgagagcgagctgttcggccacgagaagggctccttcaccggcgccatcgggctgcgcaagggtcgcttcgaggaagccgccggcggcaccatcttcctcgacgaggtcggcgagatgtcgctgaccacccaggccaagctgctgcgcgtgctgcaggagcgcagcttcgagcgggtcggcggcaacaccaccatccacgtcgacctgcgggtgatcgccgcgaccaaccgcaacctcgccgagatggtcgccgacggcaccttccgcgaggacctctactaccgcctcaacgtcttccccatcaccatcccgccactgcgcgagcgcggcagcgacatcatcaccctggccgaccacttcgtctcgcgcttctccagggaaatgggcatcgaggtcaagcgcatctccaccccggcgctgaacatgctgcagagctaccagtggccgggcaacgtgcgcgaactggagaacgtcatcgaacgcgccatgctgctcagcgaggacggggtgatccacggctaccatctgccgccgtcgctgcaggcgccggtggtcggcgacagcgaagcgccgccggacggcctagaggcgcgcctcggcgccatcgagtacgaactcatcgtcgaagccctcaagctgcaccacggcaacatgaccgaggcggccacccacctcggcctgacccgccgcgtgctcggcctgcgcatgggcaagtacaacctcaactacaaggactaccgctgagcgcggcgtaccgcccgcgtgaaagtaccaccgcgtacagggatcgttcgccacggtacgtcccctccgaaaaaacccgccggaacccttcagggacgcgggtcttgcgcgattggcgcgacctttgctccagctcctgcaggggttcgcgacggggcgctccgcccggcggaccgcacctttccatccaccgcacgcgacgggcatcgcccgtccggagagggacgatgaatcagaccgaaatccagaacctgctcgacgagccagcctgcacccacaacacggcgggcaagaccggctgctcgcgctcgcgcccgggagccacccagggcggctgcgccttcgacggcgcgcagatcgccatcctgccgatcgccgacgccgcgcacatcgtccacggtccgatcggctgtgccggcagttcctgggacctgcgcggcagcaattcctccggcccacagttgtaccgcctgggcatgaccaccgaactgtccgacgtcgacgtgatcatgggccgcggcgagaaaaagctgttccacgccatccgccgtgcagtcgagcgctaccagccgcaggcagtgttcgtctacggcacctgcgtgccggcgatgcagggcgacgacatcgaagcggtggcccgcgacgccagccagcgctggggcgtgccggtgattccggtggacggcgccggcttctacggcaccaagagcctgggcaaccgcatcgccggcgaaaccctctaccgccacgtcataggtacccgcgaaccggcgccgctgccgcaaggcgccgtcggccacggcatcacggtgcacgacgtcaacctgatcggcgaatacaacatcgccggcgagttctggcgcgtcgcgccgctgttcgacgaactcggcctgcgcattctctgcaccctgtccggcgacgcgcgctttcgcgaggtccagaccatgcaccgcgccgaagccaacatggtggtctgctccaaggccatgctcaacgtcgcccgccacctgcgcgaggactacggcacgccgttcttcgagggcagcttctacggtatcgccgatacctcccaggccctgcgcgacttcgccaaggcgatcggcgacccgtcgctgtcggtacgcaccgaactgctgatcctgcgcgaggaaaacagggccagggcggcgctcgaaccctggcgcgagcgactggccggcaagcgcgcgctgatcttctccggcggcgtgaaatcctggtcggtggtttcggcgctgcaggacctcggcgtcgaggtgatcgccaccggcaccgagaaatccaccgaggaagaccgcgcgcgcatccgcgagctgatggggccgaacgcccggatgatcgacgacaacgaccagagcgcgctgatcgccacctgcatcgagagcggcgccgacatcctcatcgctggcggacgctacctgtacgccgcgctcaaggcgcgcctggcgttcctcgacatcaaccacgaacgcgacttcggctacgccggctacggcggtttcgtcgaactggcccgccagttggcgctggccgtgcacagcccggtatggcagcgcgtgcgccaggagccgcgctgggtacgcgccagcacccgggccgcgctgctggaggaggcctgacatggcccggatcgtccagaccagcaagcccctgagcgtcaatccgctgcgcgtcagccagccgatgggcgccgcgctggccttcctcggcctgtcccgcagcctgccgctggagcacggcgcccagggctgcacggcgttcagcaaggtgttcttcacccgccacttccgcgaacccatcccattgcagaccaccgcgctggacatggccagcaccgtgctcggcagcgacgagcggctgcaggaaggcctggccacggtgatcgacgggcatcacccggaagtggtcgggctgatcaccaccggcctggtggaaatgcagggcgccgacatccgtcgcgtgctgcgcagcttccatgccgaacgctgcgaaagcgccagcgtcgtcgcggtgaacaccccggacaccctcggcgggctggagagcggctacgccctggcggtggaggcgatcatcgaggcgctggtgccggatagcgtggtgccggcggcgcagcgggcccgccaggtcaacctgctggccggatcgatgctgaccccggccgatgtcgaggcgatccgcgagtggatcgagggcttcggcctgcaggcggtgatcctgcccgacctggccgactccctcgacggtcacctgacgccccagggctacaccaccctgaccaccggcggcaccacccgtcaggaaatcgccgccatgggccgctcggcgctgaccctggtgatcggtgactccctcggccgcgccgccgacctgctgcaggcgcgtaccggagtaccggacctgcgcctgcccggactgaccgcgctggccgactgcgacgccttcgtccaggcgctcgccgatgtctccggccgcccggtgccggcgcgcatcctgcgccagcgcgagcaactgctcgacgccatggtcgacagctatgtcccggtcggcggcacgcgcatcgccatcggcgccgacgccgaccaactggtcgccatcggccgcttcctcgacgacgtcggcgcccgcctggtcgccgcggtcagcccttgccgcagcgcggcgctggaggcgctgaatatcaaggaagtgatgatcggcgacttcgaggacctggaggaacgcgcccgcgaaacctccgcgcaattgctgatcggcaactcccacgccctgcagagcgccgagcgcctcggcatcccgctgctgcgcgcgggtttcccgcagtacgaccactacggcgcggcggcgcgcctgtgggtcggctaccgcggcgcgcgccagttgctcttcgaactggccaacctgttcgccccccggggcgccggcatcgccccctaccactcgccgctgcgccaggatttcgacggcgcggccgcaccttccgcgaggagcatcactgcatgatcaaagtcgctttcgcgtccaacgaccgggtcaacgtcaacctgcacttcggcgccgccgacaccctgatggtctacgacatttcgccgggctacgccgaactgctcggcgtcggcgagttcgtccaggccaacatgaagggcgagaaccgcttcaaatcgctgtcggacgggcagaccaacatcatcgacctgcagctcagcgccgaggaactggagcgtctcgccgccaagccaccggaggacaaggtgatcgccaagctgaaattcctcgaaggctgctcggcgatctacgccgcctcgatcggtacttcgtcgatcaagcgactgataatggccggtatccagccgatcatcgtcggcaccggccagaccatcgaggacctgctcaacgaggtcagcctggccctgcactgcggcggcctgagctgggtggagcgggccaaggccaaggccgaacgcgctgcggcccagaaccccgccgcgccccacacgccctccggcaacggcctgcgcctgatcacctccatcgaggagctggaatagtccctactccactcctgctatgcttaacaaattattcatgagcacccggaattgtgagcggataacaattccttggaattgtgagcggataacaattataattaagttgttaggagggaacttagatggcattgcgtcagtgtgcaatttacggcaagggtggcatcggcaagtccaccaccacccagaacctggtcgccgccctcgccgaagccggcaagaaagtgatgatcgtcggttgtgacccgaaagccgactccacccgcctgatcctgcactccaaggcccagggcaccgtcatggaaatggccgcgtccgccggctcggtcgaagacctggagctggaagacgtgctgcagatcggcttcggcggcgtcaagtgcgtcgaatccggtggcccggagccgggcgtcggctgcgccggccgtggcgtgatcaccgcgatcaacttcctggaagaagaaggcgcctacagcgacgacctggacttcgtgttctatgacgtgctgggcgacgtggtatgcggcggcttcgccatgccgatccgcgagaacaaggcccaggaaatctacatcgtctgctccggcgagatgatggccatgtacgccgccaacaacatcgccaagggcatcgtgaaatacgcccactccggcagcgtgcgtctgggcggcctgatctgcaacagccgcaagaccgaccgcgaagacgagctgatcatggccctggccgcgaagatcggcacccagatgatccacttcgtgccgcgcgacaacgtcgtgcaacacgccgaaatccgccgcatgaccgtgatcgaatacgatccgaaggccggacaggccgacgagtaccgtgccctggctcgcaaaatcgtcgacaacaagctgctggtcatcccgaacccggcctccatggaagaactcgaagagctgctgatggaattcggcatcatggaagtcgaagacgagtccgtcgtcggcaaggccgccgccgaaggctgattcacccagcacagcgtttgcggaggagcgtgcgccgcgggctttcggaatggcttctcgcggccggcggcgcacgccgccctcccttcgaacaacccgacctcaggagctgacaccatggccatggccatcgacggctacgaatgcactgtctgcggcgactgcgagccggtctgcccgaccggttcgatcgtcttcagggacgatcactacgcgatcgaagccgacagttgcaacgaatgcaccgacgtgggcgagccgcgctgtctcggcgtctgccccgtcgacttctgcatccagccgctcgatgactgaacactgaacgactccgcaccccgttgccggcggcaggacattccgcgccgtcctgccgccggacccagaacggcgatcgcttttcctcaggggcgatcgccgttttacttttccccgctccgctagcgcccgcggacaacagccgtccgtatccgcgccgttcgccgtcctcgaccggccacgatcgcggcacagctcgccaagctacagcccgctccacaagctgaccatcggcatccagaccttcgccaagatccgcgaagacttcttacgtcgacaagaccggcttcgcccggcgaccgatcgaacgggacacactacttcctctcccggccatgccgcttcggcaagagcccgttcctcgataccctggccgaaccgttcgccggcgacgaaccttcgttccgcaggctgcagatgcatgaccgatgggactggcgccggcgccatccggcattgcggatcggcttcggcggcgcgccgatccgggacggcggataagctcgccgagccgctgctcccaaagccacgcccacctccacgtcccggcgcggaagtggcgatccccagccgcacgtccccatggtttccgggtctggaaccgtcccccggacttcccgtacggacgcccggaagccaccgccccgacggccacgcacagccacgtacagaccccccgctctccgtacttggccgaacgaaaaaccttttacgtaacccgccggccgtccacccggttgtcccgaacaggaaaaaaaagcccggaaaaggcttgccccggcgcttttccaaaacctcgaaaatgcgcacaaataattgattcgaaaggattaatctgagacagcggcgatgccgcgaaaaattcctgcaagcgctgcaaggacatatggcacgcatcctgcccttacctcttcgccaaccggtttttccggtcccggtcgagtgccgtcaggggactcgatccacgcatagagccgaggagacttcaatcatgccaatggtattgctggaatgtgacaaggacatacccgagcgccagaaacacatctatctgaaggcgcccaacgaggacacccgcgagttcctgccgatcgccaacgcggcgaccatccccggcaccctgtccgaacgcggctgcgccttctgcggcgccaagctggtgatcggcggtgtgctcaaagacaccatccagatgattcacggcccgctcggctgtgcctacgacacctggcacaccaagcgctacccgaccgacaacggccacttcaacatgaagtacgtctggtcgaccgacatgaaggaaagccatgtggtcttcggcggcgagaaacgcctcgagaagagcatgcacgaagccttcgacgaaatgcccgacatcaagcggatgatcgtctacacgacctgcccgaccgcgctgatcggcgacgacatcaaggccgtggccaagaaggtgatgaaggaccgtccggacgtggacgtcttcaccgtcgaatgccccggcttctccggtgtgtcccagtccaagggccaccacgtcctgaacatcggctggatcaacgagaaagtcgagacgatggagaaggaaatcaccagcgaatacaccatgaacttcatcggtgacttcaatattcaaggtgatacccaactgctgcaaacctactgggaccgcctgggcatccaggtcgtcgcccacttcaccggcaacggcacctacgacgacctgcgctgcatgcaccaggcccagctcaacgtggtgaactgcgcccgttcctccggctacatcgccaacgagctgaagaagcgctacggcatcccgcgtctggacatcgactcctggggcttcaactacatggccgagggcatccgcaagatctgcgccttcttcggcatcgaggagaagggcgaggagctgatcgccgaggaatacgccaagtggaagccgaagctcgactggtacaaggagcgtctgcaaggcaagaaaatggcgatctggaccggcggcccgcgcctgtggcactggaccaagtcggtcgaggacgacctgggcgtgcaagtggtggccatgtcctccaagttcggccatgaggaagacttcgagaaggtcatcgcccgcggcaaggaaggcacctactacatcgacgacggcaacgagctggaattcttcgagatcatcgacctggtcaagccggacgtgatcttcaccggcccgcgcgtcggcgaactggtcaagaagctgcacatcccctacgtcaacggccacggctaccacaacggcccgtacatgggcttcgaaggcttcgtcaacctggcccgcgacatgtacaacgccgtgcacaacccgctgcgccacctggccgccgtggatatccgcgacaagtcgcagactaccccggtcatcgtgcggggggccgcctgatgagccagtcccatctcgacgatctgttcgcctatgtcgaggagcgctgcctgtggcagttcttctcgcgcacctgggaccgcgaggaaaacatcgagggcgtgctcaatcaggtcggccgcctgctgaccggccaggagccgctgcgcggcaccccgcaggagcgcctgttctacgccgacgccctggccatggccaacgatgtccgcgagcgtttcccctgggcttcgcaggtcaacaaggaagagatcgagttcctgctcgacggtctcaagtcccgtctggtcgacgtgaccatcacccgctcgaccaaccgcgaactcaaccaccacctctactgagtcatcggcgcggagacggccggaacgccgtctccgcgcgcgaaggagccatttcatgagcaattgcgaactgaccgtgctgaagccggcagaagtcaagctgagcccgcgtgaccgcgagggcatcatcaacccgatgtacgactgccagccggccggcgcccagtacgccggcatcggcatcaaggactgcatcccgctggtccacggcggccagggctgcacgatgttcgtccgcctgctgttcgcccagcacttcaaggaaaacttcgacgtcgcctccacctcgctgcacgaggagtcggcggtgttcggcggcgccaagcgcgtcgaggaaggcgtgctggtcctcgcccgccgctacccgaacctgcgcgtcatcccgatcatcaccacctgctccaccgaagtcatcggcgacgacatcgagggcagcatccgggtctgcaaccgggcactcgaagccgaattcccggatcgcaagatctacctggcgccggtacacaccccgagcttcaagggcagccacgtcaccggctacgccgagtgcgtgaagtcggtgttcaagaccatcaccgacgcgcacggcaagggccagccgagcggcaagctcaacgtgttcccgggctgggtcaaccccggcgacgtggtgctgctcaagcgctacttcaaggaaatggacgtcgaagccaacatctacatggacaccgaggacttcgactcgccgatgctgccgaacaagagcatcgagacccacggccgcaccaccgtcgaggacatcgccgacagcgccaacgccctggccaccctgtccctggcccgctacgagggcaacaccaccggcgagttgctgcagaagaccttcgcggtgccgaatgccctggtcaacaccccctacggcatcaagaacaccgacgacatgctgcgcaagatcgccgaagtcaccggcaaggagatccccgagtcgctggtccgcgagcgcggcatcgccctcgacgccctggccgacctggcgcacatgttcttcgccaacaagaaagtggcgatcttcggccacccggacctggtgctcggcctggcccagttctgcatggaagtcgagctggaacccgtactgctgctgatcggcgacgaccagggcaacaagtacaagaaggacccgcgcatcgaggagctgaagaacaccgcgcacttcgacatcgagatcgtccacaacgccgacctctgggaactggagaagcgcatcaacgccggcctccagctcgacctgatcatgggtcactcgaagggccgctacgtcgccatcgaggccaacatcccgatggtccgcgtcggcttcccgaccttcgaccgcgccggtctctaccgcaagccctcgatcggctaccagggcgccatggaactgggcgagatgatcgccaacgccatgttcgcccacatggaatacacccgtaacaaggagtggatcctcaatacgtggtgagttgaggtgccggagcggtttccacgcactccggctgtcgagccgaccgagatgacggcatgcacggatctcccctcgcccatgcatgggcgagggagttgcgagccgtcacgcccgaggtcgttccgacggcaggccgatgcaccggaaaaccgctcccgcccccggcggctcccggctccggccggggcctccgccccgtattccagatccggccgccatgccgcattcccgggagtgatgccatgaaacagcgacaggaaatggtcgcccactaccgcgcctgcttcggcgagctgtgcgcccgaccggaacaccgtcctatcgaaccctacacccgcccccggcgcctgagcttcgcggagccggaaagcgcgaccgcccgtcaggtgccggcgcgcctggtactggccctgaccagtgcctacgccctgctcgccgactggcaggaatcccgcgacccgtcgctggccgacctgggcagttggcaacgctacctcgccctgccccgccgcaccccggcggaaaagctgatggccgagatcttccgcatcctgcgcgtgttccgcgccgcggcgatccagcagaacggcgccatcgaaatccgcgacgacggcctgatccgcgccagttgcacctacaaccgctgcgcgctgagcctgctgatcacccaggccggcctcgaactgctcaccgcctgcgtcgcctgctacctcgaatccttcgaccagccctacagcgatgcctacgaggaactgctgctcggccagtactacgccgacatcgtcgccgagatccgctccttcgccgacgacgaccgggtgctgttccagttccgccagaaagcctggttcaaccgccatgtccgcctggactgcgacaacccgcgcctgcagctcgaagaggacagccactaccgcatcgatctgggcaagtacggcgagaacgccgcccgccatccgatcgacttctacatcagcctcgacgaccgcctctacatagtgccggtcgaggccctgaaggccgggcgcatcgccgtcgccgagctgccccgctggctggcgcgcaccgacggcggaaccaggttgccggacgccttccgcctgcgcttcgcccacgaaaagaacgtcgtcggcctgccgatgacctgaatcccgcgcgccgggccgcgcccggcgcccagcctgagcccacccgacgcgaggaaacggacatgaacgagatcggccatctgaagatcgccatcaccagcaacgacctgttgcaggtcgacgccaatttcgccaccgccaagcagatcgtcatctacgacgtcacctacgacgaggccagtttcctcgacgtcatccagttcaagggcggcggcaagagcggcggcgagggcaagcgcggccccggcggcggcgccggctgctccatgggcgacccgaccggcggcgcctcggtcgaccaggtccagctgcgcgtcgacgccatgcaaggctgtgccgtgctcttcaccctcgccctcagcgacttcgccgcggtcaaggtgaagaacgccggggttttcccggtgaagatgcagcacagccgcgagatcgacgaagtggtcgcgcacctgcagcggatgatgggcagcaacccgccgctgtggctgcgcaaggcgctgggctatggcgtgcgcaacgccgattacctgatcgagcgcgaggcatgaagactctaaataattcgagttgcaggaaggcggcaaacgagtgaaggaacatgtgagcaataaaaataagaagcctgcatttgcaggcttcttatttttaaggccagcaaaaggccaggaaccgtaaaaaggccgcgttgctggcgtttttccataggctccgcccccctgacgagcatcacaaaaatcgacgctcaagtcagaggtggcgaaacccgacaggactataaagataccaggcgtttccccctggaagctccctcgtgcgctctcctgttccgaccctgccgcttaccggatacctgtccgcctttctcccttcgggaagcgtggcgctttctcatagctcacgctgtaggtatctcagttcggtgtaggtcgttcgctccaagctgggctgtgtgcacgaaccccccgttcagcccgaccgctgcgccttatccggtaactatcgtcttgagtccaacccggtaagacacgacttatcgccactggcagcagccactggtaacaggattagcagagcgaggtatgtaggcggtgctacagagttcttgaagtggtggcctaactacggctacactagaagaacagtatttggtatctgcgctctgctgaagccagttaccttcggaaaaagagttggtagctcttgatccggcaaacaaaccaccgctggtagcggtggtttttttgtttgcaagcagcagattacgcgcagaaaaaaaggatctcaagaagatcctttgatcttttctacggggtctgacgctcagtggaacgaaaactcacgttaagggattttggtcatgagattatcaaaaaggatcttcacctagatccttttaaattaaaaatgaagttttaaatcaatctaaagtatatatgagtaaacttggtctgacagctcttcctttttcaatattattgaagcatttatcagggttattgtctcatgagcggatacatatttgaatgtatttagaaaaataaacaaataggggttccgcgcacatttccccgaaaagtgccacctg

SEQ ID NO: 3 - DNA, 14240 bp, artificial sequence
  plasmid SG278
acggtcctgcatcagctcttatatattaagctaccaacttagtatataagccaaaacttaaatgtgctaccaacacatcaagccgttagagaactctatctatagcaatatttcaaatgtaccgacatacaagagaaacattaactatatatattcaatttatgagattatcttaacagatataaatgtaaattgcaataagtaagatttagaagtttatagcctttgtgtattggaagcagtacgcaaaggcttttttatttgataaaaattagaagtatatttattttttcataattaatttatgaaaatgaaagggggtgagcaaagtgacagaggaaagcagtatcttatcaaataacaaggtattagcaatatcattattgactttagcagtaaacattatgacttttatagtgcttgtagctaagtagtacgaaagggggagctttaaaaagctccttggaatacatagaattcataaattaatttatgaaaagaagggcgtatatgaaaacttgtaaaaattgcaaagagtttattaaagatactgaaatatgcaaaatacattcgttgatgattcatgataaaacagtagcaacctattgcagtaaatacaatgagtcaagatgtttacataaagggaaagtccaatgtattaattgttcaaagatgaaccgatatggatggtgtgccataaaaatgagatgttttacagaggaagaacagaaaaaagaacgtacatgcattaaatattatgcaaggagctttaaaaaagctcatgtaaagaagagtaaaaagaaaaaataatttatttattaatttaatattgagagtgccgacacagtatgcactaaaaaatatatctgtggtgtagtgagccgatacaaaaggatagtcactcgcattttcataatacatcttatgttatgattatgtgtcggtgggacttcacgacgaaaacccacaataaaaaaagagttcggggtagggttaagcatagttgaggcaactaaacaatcaagctaggatatgcagtagcagaccgtaaggtcgttgtttaggtgtgttgtaatacatacgctattaagatgtaaaaatacggataccaatgaagggaaaagtataatttttggatgtagtttgtttgttcatctatgggcaaactacgtccaaagccgtttccaaatctgctaaaaagtatatcctttctaaaatcaaagtcaagtatgaaatcataaataaagtttaattttgaagttattatgatattatgtttttctattaaaataaattaagtatatagaatagtttaataatagtatatacttaatgtgataagtgtctgacagtgtcacagaaaggatgattgttatggattataagcggccggccagtgggcaagttgaaaaattcacaaaaatgtggtataatatctttgttcattagagcgataaacttgaatttgagagggaacttagatggtatttgaaaaaattgataaaaatagttggaacagaaaagagtattttgaccactactttgcaagtgtaccttgtacctacagcatgaccgttaaagtggatatcacacaaataaaggaaaagggaatgaaactatatcctgcaatgctttattatattgcaatgattgtaaaccgccattcagagtttaggacggcaatcaatcaagatggtgaattggggatatatgatgagatgataccaagctatacaatatttcacaatgatactgaaacattttccagcctttggactgagtgtaagtctgactttaaatcatttttagcagattatgaaagtgatacgcaacggtatggaaacaatcatagaatggaaggaaagccaaatgctccggaaaacatttttaatgtatctatgataccgtggtcaaccttcgatggctttaatctgaatttgcagaaaggatatgattatttgattcctatttttactatggggaaatattataaagaagataacaaaattatacttcctttggcaattcaagttcatcacgcagtatgtgacggatttcacatttgccgttttgtaaacgaattgcaggaattgataaatagttaacttcaggtttgtctgtaactaaaaacaagtatttaagcaaaaacatcgtagaaatacggtgttttttgttaccctaagtttgttaagggatgcataaactgcatcccttaacttgtttttcgtgtacctattttttgtgaatcgattatgtcttttgcgcattcgtcgacaattgcatatattgataaaaataataatagtgggtataattaagttgttaggaggttagttagagtgaaaccagtaacgttatacgatgtcgcagagtatgccggtgtctcttatcagaccgtttcccgcgtggtgaaccaggccagccacgtttctgcgaaaacgcgggaaaaagtggaagcggcgatggcggagctgaattacattcccaaccgcgtggcacaacaactggcgggcaaacagtcgttgctgattggcgttgccacctccagtctggccctgcacgcgccgtcgcaaattgtcgcggcgattaaatctcgcgccgatcaactgggtgccagcgtggtggtgtcgatggtagaacgaagcggcgtcgaagcctgtaaagcggcggtgcacaatcttctcgcgcaacgcgtcagtgggctgatcattaactatccgctggatgaccaggatgccattgctgtggaagctgcctgcactaatgttccggcgttatttcttgatgtctctgaccagacacccatcaacagtattattttctcccatgaagacggtacgcgactgggcgtggagcatctggtcgcattgggtcaccagcaaatcgcgctgttagcgggcccattaagttctgtctcggcgcgtctgcgtctggctggctggcataaatatctcactcgcaatcaaattcagccgatagcggaacgggaaggcgactggagtgccatgtccggttttcaacaaaccatgcaaatgctgaatgagggcatcgttcccactgcgatgctggttgccaacgatcagatggcgctgggcgcaatgcgcgccattaccgagtccgggctgcgcgttggtgcggacatctcggtagtgggatacgacgataccgaagacagctcatgttatatcccgccgttaaccaccatcaaacaggattttcgcctgctggggcaaaccagcgtggaccgcttgctgcaactctctcagggccaggcggtgaagggcaatcagctgttgcccgtctcactggtgaaaagaaaaaccaccctggcgcccaatacgcaaaccgcctctccccgcgcgttggccgattcattaatgcagctggcacgacaggtttcccgactggaaagcgggcagtgagcgcaacgcaattaatgtaagttagctcactcattaggcaccgggatctcgaccgatgcccttgagagccttcaacccagtcagctccttccggtgggcgcggggcatgactagcatgatcgtgctcctgtcgttgaggacccggctaggctggcggggttgccttactggttagcagaatgaatcaccgatacgcgataacttcgtataatgtatgctatacgaacggtagctcagcgaacttagtcagcccaagcggaatttcaatatgtcttccggcatgggaacgtccgggaggttgcgcgggtcaggctcgggcggcagcacctggtagcgtatcgggatcaccccggcccaggaggggaaggcatagtcctcttcgtcgtcgaggggcgggccggtgcgcaccttgcaggacgcctcggcaatggacagggaggccacggccgtcgcctcgatttccttggcatgcacgggccgcaggcgctcccactcgcctggaatcagtccatcgacgaagtttcgcagcttctccgccttgacggcctcgtcgctgatcagttccgcgcgtcccagcagcatgaccgagcggaaattgcagttgaagttataggcggagcgggcgatcaccaggccatccagcagggagaccgtcaggcagatgtcctggtgctccagggccttgaacaggcggccggcgctggagccgtgccagtacacccggtccccctcgcgccagaagaaagtgggggtcacgaagggaaccccgttcatcatgcagcccacgtgggccaggggcgtcgcgtccagaatggccttgacggtttcctggtcgtagcgggccagccagtggtagcgcttgacatgggtacgatcgctgggcgcttcggggtattcgtcgtccgtccggttcgtcatgggaattcgttcctcgattcgtcgttgtctgtcggtacttcagagcggcggcagttcgggcagtaccaggatgggttcgttttcacccagggccagcatcagttgccgacggatgccgcccagggtttctcccgaggcggtacagccggcgcacatgcctttcaggcgcaaacgcaccttgtagccgtcgatggagacgatctccatgtcgccgccgtcggcctggaggccggggcgcagccgctcgatggtttcggtgatgatgctgctgcgttgctcttccgtcagaggctttgcggcggagcgttcgaggtcgggctgggtgttcatggcaactcctgagcagaaagaaggctgtccggcccgcaggccgggaacagcgcggttcccgatggaatgctggctttgcgtgagccatcgctcaggagggttggcaataagcatgccgcgccggatgcgcccgccattcgccattgaagagggatggatttgattcggagcggctccgcgggacgaggttttttacctaacggtaaattgccgtgggctcgtattcaccgtcgtcgcaccttctggaaagcgcctcgcgccgttggcttgccgcctgtcctcgggatagcgttatatagacatatatatcgataaggcgggctggccctaaaattgctcttactcgagaccaatggataaacaaggcggattggcatgagcgatcaggcaaccttcgagttcgacacggattacttcgtcgaggagttcagccactgcttcaccggcgagtgccgggtgaagatgctccccatcctgtacaagatcagccagatcattaccggcaatgccgatctggccgatgccctgtccatcgttctgggcgtcatgcagcagcacctgaagatgcagcgcggcatcgtcacgctctacgacatgcgtgccgaaaccatcttcatccacgatagcttcggcttgacggaagaggagaagaaacgcggcatctacgctgtcggcgagggcatcaccggcaaggtggtggaaacgggcaaggccattgtcgcccggcgtttgcaggagcatccggactttctggggcgcacccgggtatcccgcaacggcaaggccaaggcagcgtttttctgtgtgcccatcatgcgtgcccagaaagtgctgggcaccatcgctgcggagcgggtttacatgaatccgcgcctgctcaagcaggatgtcgaactgctgaccatgatcgccaccatgatcgctcccctggtcgagttgtacctgatcgagaacatcgaaagggtgcgtctggaaaacgaaaaccgtcgcctgaagcatgcgttgaaggagcgtttcaagccttccaacatcatcggcaattccaagcccatgcaggaggtgtacgaactgattcacaaggtggcctccaccaaggccacggtgctgatcctgggggaaagcggagtcggcaaggaactggtggccaacgccatccactacaacagccccaatgccgaggctgctctcgtcacctccaactgcgcggcgctgccggagaatctggcggaaagcgaactcttcggccatgaaaagggctcctttaccggagccttgaccatgcacaagggctgtttcgagcaggccgatggcggcaccatcttcctggacgaggtcggcgaactgagcccgacggtccaggccaagctgctgcgggtgctgcagaaccgtaccttcgagcgggtagggggcagcaagccggtcaaggtggatgtgcgcatcatcgcggcgaccaaccgcaacctggtggaaatggtggagcagggcacttttcgtgaagacctgtattaccgcctcaatgtctttcccattaccgtcccgccgttacgtgagcggggcagcgacgtcatcgccctggcagatcactttgtcagcgccttttccagggagaacggcaagaacgtcaagcgcatctccacgccggcgctcaacatgttgatgagctatcactggccgggcaatgtccgcgaactggaaaacgtcatggagcgtgcggtcattctgtccgatgacgatgtgatccatagctacaatctgcccccctccctgcagacctccaaagagagcggtacggccttcgggctcaccctggaggaaaagataaaggctgtcgagtgcgagatgattgtggaggccttgaaaaactccagcggtcacataggggaggcggccaaggagctgggtttgacgcggcgcatgcttggcgtacggatggagcgttatggcatcagttataaaagttttcgcggtacgcatgataccgatgagtgaatgatctccgaacgctggttttcctctccgtattttgttcccctgccaatccggatctgatctcccgaggcggttcgcgctcgagccgactcgccttcatgatccacctcccgtatatgaaaacctcatgatcggctcggcctgttgcggcagttaacgcaagtatggccgttttccattgccttttttcaacttcgagttggatgttcatatcggttctgtgtacttggtcgtagtgtgcgagttttggtgcggccgggtacgaagctcttttaagaacactcgatttttcacttttccaaatatacctggcccgaatggaagttcggggaaatggctgggtcggtaaattcttcgttcttggagcaggggctgcggagtgacttgccgagctgtttccgcatcgggccggaccatgacgaatacctgctctcctggttgctggaaaatttccagtattttcaattgattgaatagggtggtcgctgccggacaacctgtcgcgacttgtttggtggcgcggccggtaaactggcacatgcattgctttatatacgacgtcacctcgaaagtattctgtgttgacgcgatctcggttcgaacgactcctctggcgcatttcgttgtcgttgattttttgtgtctttgttcttggcaagttattgatagagaggttttttgtttagcacccggaattgtgagcggataacaattccttggaattgtgagcggataacaattataattaagttgttaggagggaacttagatgactcgtaaagtagccatttacggaaaaggcggtatcggcaaatccaccactacccagaatactgccgcagcgctggcctatttccacgacaagaaagtcttcatccacggctgcgaccccaaggcggactccacccgcctgattctcggcggcaaacctcaggaaaccctgatggacatgctgcgcgacaagggcgccgaaaagatcaccaacgacgacgtgatcaaaaaaggctttctggacatccagtgcgtggagtccggcggccccgagccgggcgttggttgcgctggccgcggcgtgatcaccgccatcgacctgatggaagaaaacggcgcctataccgatgacctggatttcgtgttcttcgacgtactgggcgacgtcgtgtgcggcggtttcgccatgccgatccgcgacggcaaggcccaggaagtctacatcgtggcttccggggagatgatggccatttatgcggccaacaacatctgcaagggcctggtgaaatacgccaaacaaagtggcgtgcgcctgggcggcatcatttgcaacagccgtaaggtggatggcgagcgcgagttcctggaagagttcaccgcggccatcggtaccaagatgatccacttcgttccgcgcgacaatatcgtgcagaaggccgagttcaacaagaagaccgtgaccgagttcgctccagaggaaaaccaggccaaggagtacggcgagctggcccgcaagatcattgagaacgatgaattcgtcattcccaaaccgctgaccatggaccaactggaagacatggtcgtcaagtacggtattgccgactgatcgcagattccatttatcactctaaaggagatgtgtcatgccgcatcacgagttcgagtgcagcaaggttattcccgagcggaagaagcatgccgttatcaaaggtaaaggcgaaacgctggccgacgccctgcctcaagggtatctgaataccatccctggttccatctccgagcgtggttgtgcctactgtggtgccaagcacgttatcgggactcccatgaaggatgtgattcacatcagtcatggcccggtcggctgcacttacgatacctggcagaccaagcgttatatcagcgacaacgacaacttccagctcaaatacacctatgccaccgatgtgaaggaaaagcatatcgtgttcggcgccgagaagttgctgaagcagaacatcatcgaagccttcaaggcgttcccgcagatcaagcggatgaccatctaccagacctgcgccacggcgctgatcggagacgacatcaacgccatcgccgaagaggtgatggaagagatgccggaggtggatatcttcgtctgcaactcgcccggtttcgccggtccgagccagtccggtggtcaccacaagatcaacatcgcctggatcaaccagaaggtgggtaccgtcgagccggagatcaccggcgaccatgtgatcaactatgtgggcgagtacaacattcagggcgaccaggaagtgatggtggattacttcaagcgcatgggtatccaggtgctatccactttcaccggcaacggttcctacgacggcctgcgtgccatgcacagagcccatctgaacgtactggaatgtgcccgctccgccgagtacatctgcaacgaactgcgtgtccgttacggcattccgcgtctggatatcgacggtttcggtttcaagccactggcggattcgctgcgtaagatcggtatgttcttcggcatcgaagaccgtgccaaggccatcatcgacgaggaagtcgcccgctggaagccggagttggactggtacaaggagcggctgatgggcaagaaggtctgcctgtggccgggcggttccaaactctggcactgggcccatgtgatcgaggaagaaatgggcctcaaggtggtgtcggtctataccaagttcggccatcagggcgacatggagaaaggcatcgcccgttgcggcgaaggcactttggccatcgacgacccgaacgaattggaaggtctggaagccctggagatgctcaagcccgacatcatcctgaccggcaagcgtccgggtgaagtggccaagaaagtccgggttccctacctgaacgcccacgcctaccacaacggcccgtacaaaggcttcgaaggttgggtgcgtttcgcccgcgatatttacaacgccatctactcgccgatccatcagctctccggtatcgacatcactaaagacaatgcaccggagtggggtaatggtttccgtactcgccaaatgctgtccgatggcaacttgagcgatgcagtacgtaactcggaaaccttgcgccagtacaccggcggctacgacagcgtgagcaagctgcgcgaacgggaatatcccgccttcgagcgcaaggtcggctgaggagataacctgatgagtaccgcttccgccgctgctgtggtcaaacagaaggtcgaagctcccgtgcatccgatggatgcacggatcgacgagctgaccgactacatcatgaaaaactgcctctggcagttccattcccgctcctgggaccgggaacgccagaacgccgaaatcctgaagaaaaccaaggaactgctgtgcggtgagccagtggatctgagcacatcccatgatcgttgctactgggtcgatgcggtttgtctggccgacgactatcgggagcactatccctggatcaatagcatgtccaaggaagaaatcggctccttgatgcaaggactgaaagaccgcatggattatctgaccatcaccggctcgctcaacgaagagttgagcgacaaacactattaagaggggttcgacatgacttgcgaagtcaaggaaaaagggcgggttggcactatcaaccccatctttacctgtcaaccggccggtgcccagttcgtcagtatcggtatcaaggattgcatcggtatcgtgcatggcggccaaggctgcgtgatgttcgtccgcctgatcttttcccagcactacaaggaaagtttcgagctggcctcttcctccctgcacgaggacggcgccgtgttcggtgcctgcggccgggtcgaggaagcggtcgatgtgctgctcagccgctatcccgacgtgaaggtggtgcccatcatcaccacctgctccaccgagatcatcggcgacgacgtggacggggtgatcaagaagctcaacgaagggctgctgaaagagaagttcccggaccgggaagtccatctgatcgccatgcacacgccgagcttcgtgggcagcatgatcagcggctacgacgtggccgttcgggatgtggtcaggcatttcgccaagcgcgaagcgcccaacgacaagatcaatctgctcaccggctgggtcaatccgggggatgtcaaggagctgaagcacctgctcggggaaatggacatcgaagccaacgtgttgttcgagatcgaaagtttcgactcgccgatcctgccggatggcagtgccgtttcccacggcaataccaccatcgaggatctgatcgacaccggcaatgcccgggcgaccttcgccctgaaccgctacgaaggcaccaaggccgccgagtatctgcagaagaaattcgagatcccggcgatcatcggcccgaccccgatcggcatccgcaataccgacatcttcctgcagaacctgaagaaggcgacgggcaagccgattccccagtcgctggcccatgagcgcggggtggccatcgatgccctggccgacctgacccacatgtttctggccgaaaagcgtgtggccatctatggggcgccggatctggtgatcggcctggccgaattctgcctggatctggagatgaagcccgtcttgctgctgctgggcgacgacaactccaagtacgtggacgatccgcgcatcaaggcgcttcaggaaaacgtcgattacggcatggaaatcgtcaccaatgcggatttctgggaactggaaaaccgcatcaagaacgagggtctggaactggatctgatcctcggtcactccaagggccgtttcatctccatcgactacaacatcccgatgctgcgcgtgggtttcccgacctacgaccgcgccggcctgttccgctatcccacggtgggctatggcggtgccatctggctggccgagcagatggccaacaccctgttcgccgatatggaacacaagaagaacaaggaatgggtcctcaacgtctggtaaggaccatccaatccttgtagttggcgcgagagggcagcgggctgcatcgctgtccttctcgccgatccctgtgccgctgtatctggtgcatccgcttgccgggtcggacggtggatgcacgttttttccgacggcgcggacaggctggactcgaagaggcccctatgaaaatcgcggcttatctcgatcggcatggagacatggccggtctctacacggccggcaggttccagctctacgaaaaagacgacgaacactggattttgaaaaggcaggttccgctcgaaatcacggcggagatgaacattcccgaggtgaagcaggccctgcgcgaggccgtggtccatctggaggactgcaagaccctgctgtccgccgaggtgcgcggcctgctgtattccctcctgcaggaagaaatgggcttccggacctggaagtcgcagggctccctgcacgaacaactggacaacgtggcccgcaacgagctggatctggcgctcagggaggccctggccgccgccgaggccgagaaggccgcggcgcaggcgtccgccggcggctgcgcgggcggaggcggcggcgggaaacggcgttccgcggccggcgccccggagcccgaatccatcccgcagccggaatgcctgggcgaaggccgttaccgcctcgacctggaggccgcgctcaagggcaacaaggagctcaattcccgccaggtactgatcccctttctggaaaacaccgtcttccgcgagttcgagatcctctgcgatcacgtcccgcgctggttttcccacaagctcgacgaactcaacctcagggccgagtccgaggagctcgccggcccgaaaaagggcctgaagctgcgtgttctgcctgggccggaggccgcgccggccggctgaaatcccatcccgcgatccatcctttcaacgacggacaggagtctttccatgagcgtttcccaagacaaccatctgctctatttcgcctacggcgtggacatgaacccggaacacatcgcggcccgctgcgacgaaccgcaagtgttcatggtggctcatttgcccgaccacgccctggcctttttcggatataccgaccgctgggacggtggtctggaaagcatcgtggagtcccccggcgatcggctatacgggttgatctacgaagtgacctacaacgatgcggattatctggatgcttgccagggcgcgcgcctggacggcaccggaccctatttccagttcccggtggaggtgatcggcgaagacggccggagccattcggtattcacctataaaaagtccagcctgggggaaaccacccagcccagcagcggctacctggactacatcgtcgccggtgcgacggcgcaaggattgccggaggcttacatagagcgcctgaagcggatcgacaacaaaccgaccgatgagccattacccagaaagaccgatctgaacaggattctggtgggaggccatgcctgcaactgtggttgatccctactccactcctgctatgcttaacaaattattcatagactctaaataattcgagttgcaggaaggcggcaaacgagtgaaggaacatgtgagcaataaaaataagaagcctgcatttgcaggcttcttatttttaaggccagcaaaaggccaggaaccgtaaaaaggccgcgttgctggcgtttttccataggctccgcccccctgacgagcatcacaaaaatcgacgctcaagtcagaggtggcgaaacccgacaggactataaagataccaggcgtttccccctggaagctccctcgtgcgctctcctgttccgaccctgccgcttaccggatacctgtccgcctttctcccttcgggaagcgtggcgctttctcatagctcacgctgtaggtatctcagttcggtgtaggtcgttcgctccaagctgggctgtgtgcacgaaccccccgttcagcccgaccgctgcgccttatccggtaactatcgtcttgagtccaacccggtaagacacgacttatcgccactggcagcagccactggtaacaggattagcagagcgaggtatgtaggcggtgctacagagttcttgaagtggtggcctaactacggctacactagaagaacagtatttggtatctgcgctctgctgaagccagttaccttcggaaaaagagttggtagctcttgatccggcaaacaaaccaccgctggtagcggtggtttttttgtttgcaagcagcagattacgcgcagaaaaaaaggatctcaagaagatcctttgatcttttctacggggtctgacgctcagtggaacgaaaactcacgttaagggattttggtcatgagattatcaaaaaggatcttcacctagatccttttaaattaaaaatgaagttttaaatcaatctaaagtatatatgagtaaacttggtctgacagctcttcctttttcaatattattgaagcatttatcagggttattgtctcatgagcggatacatatttgaatgtatttagaaaaataaacaaataggggttccgcgcacatttccccgaaaagtgccacctg

SEQ ID NO: 4 - DNA, 35127 bp, artificial sequence
  plasmid SG323
acggtcctgcatcagctcttatatattaagctaccaacttagtatataagccaaaacttaaatgtgctaccaacacatcaagccgttagagaactctatctatagcaatatttcaaatgtaccgacatacaagagaaacattaactatatatattcaatttatgagattatcttaacagatataaatgtaaattgcaataagtaagatttagaagtttatagcctttgtgtattggaagcagtacgcaaaggcttttttatttgataaaaattagaagtatatttattttttcataattaatttatgaaaatgaaagggggtgagcaaagtgacagaggaaagcagtatcttatcaaataacaaggtattagcaatatcattattgactttagcagtaaacattatgacttttatagtgcttgtagctaagtagtacgaaagggggagctttaaaaagctccttggaatacatagaattcataaattaatttatgaaaagaagggcgtatatgaaaacttgtaaaaattgcaaagagtttattaaagatactgaaatatgcaaaatacattcgttgatgattcatgataaaacagtagcaacctattgcagtaaatacaatgagtcaagatgtttacataaagggaaagtccaatgtattaattgttcaaagatgaaccgatatggatggtgtgccataaaaatgagatgttttacagaggaagaacagaaaaaagaacgtacatgcattaaatattatgcaaggagctttaaaaaagctcatgtaaagaagagtaaaaagaaaaaataatttatttattaatttaatattgagagtgccgacacagtatgcactaaaaaatatatctgtggtgtagtgagccgatacaaaaggatagtcactcgcattttcataatacatcttatgttatgattatgtgtcggtgggacttcacgacgaaaacccacaataaaaaaagagttcggggtagggttaagcatagttgaggcaactaaacaatcaagctaggatatgcagtagcagaccgtaaggtcgttgtttaggtgtgttgtaatacatacgctattaagatgtaaaaatacggataccaatgaagggaaaagtataatttttggatgtagtttgtttgttcatctatgggcaaactacgtccaaagccgtttccaaatctgctaaaaagtatatcctttctaaaatcaaagtcaagtatgaaatcataaataaagtttaattttgaagttattatgatattatgtttttctattaaaataaattaagtatatagaatagtttaataatagtatatacttaatgtgataagtgtctgacagtgtcacagaaaggatgattgttatggattataagcggccggccagtgggcaagttgaaaaattcacaaaaatgtggtataatatctttgttcattagagcgataaacttgaatttgagagggaacttagatggtatttgaaaaaattgataaaaatagttggaacagaaaagagtattttgaccactactttgcaagtgtaccttgtacctacagcatgaccgttaaagtggatatcacacaaataaaggaaaagggaatgaaactatatcctgcaatgctttattatattgcaatgattgtaaaccgccattcagagtttaggacggcaatcaatcaagatggtgaattggggatatatgatgagatgataccaagctatacaatatttcacaatgatactgaaacattttccagcctttggactgagtgtaagtctgactttaaatcatttttagcagattatgaaagtgatacgcaacggtatggaaacaatcatagaatggaaggaaagccaaatgctccggaaaacatttttaatgtatctatgataccgtggtcaaccttcgatggctttaatctgaatttgcagaaaggatatgattatttgattcctatttttactatggggaaatattataaagaagataacaaaattatacttcctttggcaattcaagttcatcacgcagtatgtgacggatttcacatttgccgttttgtaaacgaattgcaggaattgataaatagttaacttcaggtttgtctgtaactaaaaacaagtatttaagcaaaaacatcgtagaaatacggtgttttttgttaccctaagtttgttaagggatgcataaactgcatcccttaacttgtttttcgtgtacctattttttgtgaatcgattatgtcttttgcgcattcgtcgacaattgcatatattgataaaaataataatagtgggtataattaagttgttaggaggttagttagagtgaaaccagtaacgttatacgatgtcgcagagtatgccggtgtctcttatcagaccgtttcccgcgtggtgaaccaggccagccacgtttctgcgaaaacgcgggaaaaagtggaagcggcgatggcggagctgaattacattcccaaccgcgtggcacaacaactggcgggcaaacagtcgttgctgattggcgttgccacctccagtctggccctgcacgcgccgtcgcaaattgtcgcggcgattaaatctcgcgccgatcaactgggtgccagcgtggtggtgtcgatggtagaacgaagcggcgtcgaagcctgtaaagcggcggtgcacaatcttctcgcgcaacgcgtcagtgggctgatcattaactatccgctggatgaccaggatgccattgctgtggaagctgcctgcactaatgttccggcgttatttcttgatgtctctgaccagacacccatcaacagtattattttctcccatgaagacggtacgcgactgggcgtggagcatctggtcgcattgggtcaccagcaaatcgcgctgttagcgggcccattaagttctgtctcggcgcgtctgcgtctggctggctggcataaatatctcactcgcaatcaaattcagccgatagcggaacgggaaggcgactggagtgccatgtccggttttcaacaaaccatgcaaatgctgaatgagggcatcgttcccactgcgatgctggttgccaacgatcagatggcgctgggcgcaatgcgcgccattaccgagtccgggctgcgcgttggtgcggacatctcggtagtgggatacgacgataccgaagacagctcatgttatatcccgccgttaaccaccatcaaacaggattttcgcctgctggggcaaaccagcgtggaccgcttgctgcaactctctcagggccaggcggtgaagggcaatcagctgttgcccgtctcactggtgaaaagaaaaaccaccctggcgcccaatacgcaaaccgcctctccccgcgcgttggccgattcattaatgcagctggcacgacaggtttcccgactggaaagcgggcagtgagcgcaacgcaattaatgtaagttagctcactcattaggcaccgggatctcgaccgatgcccttgagagccttcaacccagtcagctccttccggtgggcgcggggcatgactagcatgatcgtgctcctgtcgttgaggacccggctaggctggcggggttgccttactggttagcagaatgaatcaccgatacgcgataacttcgtataatgtatgctatacgaacggtagctcagctagcacccggaattgtgagcggataacaattccttggaattgtgagcggataacaattataattaagttgttaggagggaacttagatgaccccggccaacccgaccctgagcaacgagccgcaagcgcctcacgccgagagcgacgagctgcttcccgagatctttcgccagacggtggagcatgcgcccatcgccatttccatcaccgacctcaaggccaacattctttacgccaatcgcgctttccgcaccatcaccggctacggcagcgaggaagtgctcggcaagaacgaatcgatcctctccaacggcaccacgccgcgcctggtctaccaggccctgtggggccggctggcgcagaagaagccctggtccggcgtgctggtcaaccgccgcaaggacaagaccctgtacctggccgaactgaccgtggcgccggtgctcaacgaggccggcgagaccatctactacctgggcatgcaccgcgacaccagcgaattgcacgaactggaacaacgcgtcaacaaccagcgcctgatgatcgaggcggtggtcaacgccgccccggcggcgatggtggtgctcgaccgccagcaccgggtgatgctctccaacccgagcttctgccgcctggcccgcgacctggtcgaggatggcagcagcgagagcctggtggcgctgctgcgggaaaacctcgccgcccccttcgagacgctggaaaaccagggcagcgccttctccggcaaggagatctccttcgacctgggcggccgctcgccgcgctggctgtcctgccacggccgggccatccacatcgagaacgagcaggcccacgtgttcttcgcgcccaccgaggaacgctacctgctgctgaccatcaacgacatctccgagctgcgccagaagcagcaggattcgcggctcaacgcgctgaaggcgctgatggccgaggaagagctgctggaaggcatgcgcgagaccttcaacgccgccatccatcgcctgcagggcccggtcaacctgatcagcgcggcgatgcgcatgctcgaacggcgcctcggcgacaaggccggcaacgacccggtgctgagcgccatgcgcgaagccagcacggccggaatggaggcactggagaacctcagtggctccattccggtgcgcatggccgagtccaagatgccggtcaacctcaaccagttgatccgcgaggtgatcaccctgtgcaccgaccagttgctggcccagggcatcgtcgtcgactggcagccggcgctgcgcctgccctgggtgatgggcggggaaagcagcctgcgcagcatgatcaagcacctggtcgacaacgccatcgagtccatgagccagaaccaggtcagccgccgcgagctgttcatcagcacccgcgtggagaaccacctggtgcgcatggagatcaccgacagcggcccgggcattccgcccgacctggtgctgaaggtgttcgagccgttcttcagcaccaagccgccacaccgcgtcgggcgcggcatgggcctgccggtggtgcaggagatcgtcgccaagcacgccggcatggtgcacgtagacaccgactatcgcgaaggctgccggatcgtcgtcgagctgcccttctcggcctccacctgaacagcgacagggaatgcccatgaatgcaaccatccctcagcgctcggccaaacagaacccggtcgaactctatgacctgcaattgcaggccctggcgagcatcgcccgcacgctcagccgcgaacaacagatcgacgaactgctcgaacaggtcctggccgtactgcacaatgacctcggcctgctgcatggcctggtgaccatttccgacccggaacacggcgccctgcagatcggcgccatccacaccgactcggaagcggtggcccaggcctgcgaaggcgtgcgctacagaagcggcgaaggcgtgatcggcaacgtgctcaagcacggcaacagcgtggtgctcgggcgcatctccgccgacccgcgctttctcgaccgcctggcgctgtacgacctggaaatgccgttcatcgccgtgccgatcaagaaccccgagggcaacaccatcggcgtgctggcggcccagccggactgccgcgccgacgagcacatgcccgcgcgcacgcgccttctggagatcgtcgccaacctgctggcgcagaccgtgcgcctggtggtgaacatcgaggacggccgcgaggcggccgacgagcgcgacgaactgcgtcgcgaggtgcgcggcaagtacggcttcgagaacatggtggtgggccacacccccaccatgcgccgggtgttcgatcagatccgccgggtcgccaagtggaacagcaccgtactggtcctcggcgagtccggtaccggcaaggaactgatcgccagcgccatccactacaactcgccgcgcgcgcaccgccccttcgtgcgcctgaactgcgccgcgctgccggaaaccctgctcgagtccgaactcttcggccacgagaagggcgccttcaccggcgcggtgaagcagcgcaaggggcgtttcgagcaggccgacggcggcaccctgttcctcgacgagatcggcgagatctcgccgatgttccaggccaagctgctgcgcgtgctgcaggaaggcgagttcgagcgggtcggcggcaaccagacggtgcgggtcaacgtgcgcatcgtcgccgccaccaaccgcgacctggaaagcgaggtggaaaagggcaagttccgcgaggacctctactaccgcctgaacgtcatggccatccgcattccgccgctgcgcgagcgtaccgccgacattcccgaactggcggaattcctgctcggcaagatcggccgccagcagggccgcccgctgaccgtcaccgacagcgccatccgcctgctgatgagccaccgctggccgggcaacgtgcgcgaactggagaactgcctggagcgctcggcgatcatgagcgaggacggcaccatcacccgcgacgtggtctcgctgaccggggtcgacaacgagagcccgccgctcgccgcgccgctgcccgaggtcaacctggccgacgagaccctggacgaccgcgaacgggtgatcgccgccctcgaacaggccggctgggtgcaggccaaggccgcgcggctgctgggcatgacgccgcggcagatcgcctaccgcatccagaccctcaacatccacatgcgcaagatctgacgggaccctccggcaatggatggccggctcctcccccctccccgttctccccgccccctcgtccgctacgggcgcccgtccacgacggacatcgcctccgactcccgccacactgcttgtcgcttgtcgtacagaagcgcgcgaagggcggtgcggatttgtccgttgcgcgacaaattcggcccctcgttttcaaataaatcattcaaaaacaattacttgaataatcggcacgggtattgctcggctcttggggtaaagactctctcagccggagacagaacatggaactgagcgtacttgggcaaaacaatgggggacagcacagcgctggcggctgttcctcaagtagctgcggcagcacgcacgatcagctctcccacctgccggaaaacattcgtgcgaaggtgcagaaccatccgtgctattcggaagaggcgcaccactatttcgcgcgcatgcacgtggcggtggcgcctgcctgcaacatccagtgccactactgcaaccgcaagtacgactgcgccaacgagtcgcgtccgggcgtggtgtccgaagtgctgacccccgagcaggcggtcaagaaggtcaaggccgtggccgccgccatcccgcagatgagcgtgctcggcatcgccggccccggcgaccccttggccaacccgaagcgcaccctcgacaccttccgcatgctcagcgagcaggccccggacatcaagctgtgcgtttccaccaacggcctggccctgccggagtgcgtcgaggaactggccaagcacaacatcgaccacgtcaccatcaccatcaactgcgtggacccggagatcggcgccaagatctatccgtggatctactggaacaacaagcgcatccgcggcgtcaaggccgccaagatcctcatcgagcagcagcagaagggtctggagatgctggtggcgcgcggcatcctggtgaaggtcaattcggtgatgatccccggcgtcaacgacgagcacctgaaggaagtcagcaagatcgtcaaggccaagggcgccttcctgcacaacgtcatgccgctgatcgccgagcccgagcacggcaccttctacggcgtgatgggccagcgcagccccgagccggaagaactgcaggacctgcaggacgcctgcgccggcgacatgaacatgatgcgccactgccgccagtgccgcgccgacgcggtcggcatgctcggcgaggaccgcggcgacgagttcaccctggacaagatcgagtcgatggagatcgattacgaggcggcgatggtcaagcgcgccgccatccatgcggcgatcaaggaagagctggacgagaaggcggcgaagaaggaacggctggctggcctgtccgttgcatccgtccagaacggcacgagcggtcgctaccgtccggtgctgatggccgtggccaccagcggcggcggcctgatcaaccagcacttcgggcacgccaccgagttcctggtgtacgaagcctcgccgtccggggtgcgcttcatcggccatcgccgggtcgaccagtactgcgtcggcaacgacacctgcggcgagaaggaaagtgcactcgccggcagcatccgtgccctgaagggatgcgaggcggtgctctgctcgaagatcggtttcgaaccctggagcgacctggagaccgccggcatccagcccaatggcgagcacgccatggagcccatcgaggaagcggtcatggcggtctaccgggaaatgatcgagtcgggtcggctggagaatgacggagccctgctgcaggccaaggcctgagcgggcagcgaaacaattcgaggattgcgtggaggtgcgtgatggcgctgaaaattgtggaatcctgtgtcaattgttgggcatgtgtcgatgtctgtccgagcgaggcgatctccctggccggcccgcacttcgagatcagtgcgagcaagtgcaccgagtgtgacggggactacgcggaaaagcagtgcgcgagcatctgtccggtcgagggcgccatcctgctcgccgacggcacgccggcaaacccgcctggttcgctgaccgggattcccccggagcgtctggccgaggccatgcgcgaaatccaggcccgctaaggagagtcgccatgaccagcaccagcatcgtcttctacgagaagcccggctgtgccaccaaccgcctgcagaagcagttgttgcgttcggccggtctgcacttggaggtccgcaacctgctcagcgaaccctggacgcccgagcgcctgcgccccttcttcggcgatcggccggtggtcgaatggttcaaccgctcggcaccggcgatcaagtacggagaactggaccccacccaactgagcgccagccaggcgctcgagctgatgctggctcacccgatcctgatccgccgcccgctgatccactacggctcgcagtacatggccggcttcgacctggtcaagctgtgtacccacctgcccgccaagaacgacctgcccgacgccggcgaggacctggaaaagcgctcggtcgggcagaacccgatcggctgcctggcggcggggaaccagtgatgggcagcgccgcggcccatcggggggataccacccaagccgtgcgtcatgacagagccaaccacctctggctggagcgcatcgtccgctcccagcgcgacggtctgagctgcctgccgttccatctgggcctcgacgagcggagctatgccgaactgatccgcacccattttcccgagctggccggccagaccagcgccagcctgggctcgctggcccacgaatgcagcgagctgcgcgaagacctactggaaatgcgccgcgacgaatgggaggaactgcgcgtcctgttgctggacggccgccgcggcgacgaccccgaagagctctggatggcgagcatcgtcgccgccgcctgcctgggtggcgatcacctgtggcgcgacctgggactcgagagccgcgagacgctgagggtcctgctgatgcacaatttcccccaccttgccgagcgcaacgtgaaaaacatgcgctggaagaagtttttctacaagcaactgtgcgaacaggatggcggctacgtctgccgctcccccagttgcgagcagtgcccgtctcatcacgattgttttggagcagagatatgatccctactccactcctgctatgcttaacaaattattcatagactctaatagcacccggaattgtgagcggataacaattccttggaattgtgagcggataacaattataattaagttgttaggagggaacttagatggctatgcgtcaatgcgccatctacggcaaaggtggtatcggtaagtccaccactactcagaacctggtggcagccctggctgagatgggcaagaaggtcatgatcgttggttgtgacccgaaagctgactccacccgcctgatcctgcactccaaggcccagaacaccatcatggaaatggctgccgaagccggtaccgtggaagatctggagctggaagacgtgctgaaggctggctacggcggcgtcaagtgcgttgagtccggtggtccggagccgggcgttggctgcgccggccgtggtgttatcaccgccatcaacttcctggaagaggaaggcgcctacgaagacgatctggacttcgtattctacgacgtgctgggcgacgtggtgtgtggcggcttcgccatgccgatccgcgagaacaaggcccaggaaatctacatcgtctgctccggtgagatgatggccatgtacgccgccaacaacatctccaagggcatcgtgaagtatgccaactccggcagcgtgcgtctgggcggcctgatctgcaacagccgtaacaccgaccgcgaagacgagctgatcatcgctctggccaacaagctgggcacccagatgatccacttcgtgccgcgtgacaacgtcgtgcagcgcgccgaaatccgccgcatgaccgtgatcgaatacgatccgaaagccaagcaagccgacgaataccgcgctctggcccgcaaggtcgtcgacaacaaactgctggtcatcccgaacccgatcaccatggacgagctcgaagagctgctgatggaattcggcatcatggaagtcgaagacgaatccatcgtcggcaaaaccgccgaagaagtctgatagccgctccggtttcagaaggacgggacagggcagattggctctgtcggggtggcgccccccgcatggggcgggcgccccacccgttacccgcatatgaacgctaaggcaagaggagtcatacccatgaccggtatgtcgcgcgaagaggttgaatccctcatccaggaagttctggaagtttatcccgagaaggctcgcaaggatcgtaacaagcacctggccgtcaacgacccggcggttacccagtccaagaagtgcatcatctccaacaagaagtcccagcccggtctgatgaccatccgcggctgcgcctacgccggttccaaaggcgccgtctggggccccatcaaggacatgatccacatctcccacggtccggtaggctgcggccagtattcgcgcgccggccgtcgtaactactacatcggtaccaccggtgtgaacgccttcgtcaccatgaacttcacctcggacttccaggagaaggacatcgtgttcggtggcgacaagaagctcgccaaactgatcgacgaagtggaaaccctgttcccgctgaacaagggtatctccgtccagtccgagtgcccgatcggcctgatcggcgacgacatcgaatccgtgtccaaggtcaagggcgccgagctcagcaagaccatcgtaccggtccgttgcgaaggcttccgcggcgtttccgcctccctgggccaccacatcgccaacgacgcagtccgcgactgggtcctgggcaagcgtgacgaagacaccaccttcgccagcactccttacgatgtggccatcatcggcgactacaacatcggcggcgacgcctggtcttcccgcatcctgctggaagaaatgggcctgcgttgcgtagcccagtggtccggcgacggctccatctccgaaatcgagctgaccccgaaggtcaagctgaacctggttcactgctaccgctcgatgaactacatctcccgtcacatggaagagaagtacggtatcccatggatggagtacaacttcttcggcccgaccaagaccatcgagtcgctgcgtgccatcgccgccaagttcgacgagagcatccagaagaagtgcgaagaggtcatcgccaagtacaagcccgagtgggaagcggtggtcgccaagtaccgtccgcgcctggaaggcaagcgcgtcatgctctacatcggtggcctgcgtccgcgccacgtgatcggcgcctacgaagacctgggcatggaagtggtgggtaccggctacgagttcgcccacaacgacgactatgaccgcaccatgaaagaaatgggtgactccaccctgctgtacgatgacgtgaccggctacgaattcgaagaattcgtcaagcgcatcaagcccgacctgatcggctccggtatcaaggagaagttcatcttccagaagatgggcatccccttccgtcaaatgcactcctgggattattccggcccctaccacggcttcgatggcttcgccatcttcgcccgtgacatggacatgaccctgaacaatccgtgctggaagaaactgcaggctccctgggaagcttccgaaggcgccgagaaagtcgccgccagcgcctgatagcagagcaatcgtacgcaacgtccgctgcgggcggtttccgcccgcggccgacatccgctaacgccgttcacagatgagtgaggcgtaggagagagtcatgagccagcaagtcgataaaatcaaagccagctacccgctgttcctcgatcaggactacaaggacatgcttgccaagaagcgcgacggcttcgaggaaaagtatccgcaggacaagatcgacgaagtattccagtggaccaccaccaaggaataccaggagctgaacttccagcgcgaagccctgaccgtcaacccggccaaggcttgccagccgctgggcgccgttctctgcgccctcggtttcgagaagaccatgccctacgtgcacggttcccagggttgcgtcgcctacttccgctcctacttcaaccgtcatttccgcgagccggtttcctgcgtttccgactccatgaccgaagacgcggcagtgttcggcggccagcagaacatgaaggacggtctgcagaactgtaaggctacctacaagcccgacatgatcgcagtgtccaccacctgcatggccgaggtcatcggtgacgacctcaacgccttcatcaacaactcgaagaaggaaggtttcattcctgacgagttcccggtgccgttcgcccataccccgagcttcgtgggcagccacgtgaccggctgggacaacatgttcgaaggcattgctcgctacttcaccctgaagtccatggacgacaaggtggttggcagcaacaagaagatcaacatcgtccccggcttcgagacctacctgggcaacttccgcgtgatcaagcgcatgctttcggaaatgggcgtgggctacagcctgctctccgatccggaagaagtgctggacaccccggctgacggccagttccgcatgtacgcgggcggcaccactcaggaagagatgaaggacgctccgaacgccctcaacaccgtcctgctgcagccgtggcacctggagaagaccaagaagttcgtcgagggtacctggaagcacgaagtaccgaagctgaacatcccgatgggcctggactggaccgacgagttcctgatgaaagtcagcgaaatcagcggccagccgattccggcgagcctgaccaaggagcgtggccgtctggtcgacatgatgaccgactcccacacctggctgcacggcaagcgtttcgccctgtggggtgatccggacttcgtgatgggcctggtcaagttcctgctggaactgggttgcgagccggtacacattctctgccacaacggcaacaagcgttggaagaaggcggtcgacgccatcctcgccgcttcgccctacggcaagaatgctaccgtctacatcggcaaggacctgtggcacctgcgttcgctggtcttcaccgacaagccggacttcatgatcggcaacagctacggtaagttcatccagcgcgacaccctgcacaagggcaaggagttcgaggttccgctgatccgtatcggcttcccgatcttcgaccgtcatcacctgcatcgctccaccaccctgggttacgagggcgccatgcagatcctgaccaccctggtgaactcgatcctggaacgtctggacgaggaaacccgcggtatgcaggccaccgactacaaccacgacctggtacgctaagtcgtcggttcaagtggtatcggccggagcggcgcaagccgctccggctcttccttggcggcggccgcaggtggtcgggccttttgcccgcgatctgcggcaaccgccaaacccgtctaaggagcaagcccatgcccagcgtcatgattcgccgcaacgacgaaggccaactgaccttctatatcgccaagaaagaccaggaagagatcgtggtgtccctggagcatgacagccccgaactctggggtggcgaagtcaccctcggcgacggttcgacctatttcatcgagccgataccgcaacccaagctgccgatcaccgtgcgcgccaagcgagccggcgaggcctgattccatgactgcgcaaccgccattcggccaggcccccctgccggcccatctggccctgcgcatcgctctggcggcacgctcgctcaagggggtggataccgcccacctgctgcgcgccctgattgccgccgttggagaacccatcacggaagcgcgtctacgcaaattgcgtgcttcccgcctgcgtacccgcctgctcgaaacgtgcggagagggtgtgcagtcgaccctgaccgatcgccagctgcacagcgcgctcggtctgctcaaaggccgtggcgtgcgcatgccggaagatcccctgccgatcccggagccctatcgcaacggtgaattccaggactcggtgcgcatcgcctgcgcttccgacaacggcgagcgcctggacggcatcttcagcaactgtacacgctttctcatctaccagatctcgccccgcgagagccgcctgatcgatctacgcgaacccggcccctgccgcgaggacgaagaccgtcatgcgcgtcgggcagaattgctcgccgactgccagttgctctacaccctgagcatcggtggcccggcggcggccaaggtggtgcgtgccggggtccatcccgtgcgcctggcccgggccaggccggcccgcgagatcgtcgaggagctgcagcgggtgctggccaccgcgccgcccccctggctggccaaggccatgggtgccgagccagaccagcgcatacgtttcacccagtaaccgctccggatgaggacacagccatgatcagccaaacacttctcgacgatgtcgttcgccaggccgaacagggagtgctgggcgaaagcctactcgccagcctgcgcagcgcccatccgggggtgcacttcacctgctgcatggacgacgacgtcgtggtcaacgccaagccggtcgtcgagcgtccgggcttcaacgtctatctggtcaactcctgcgaccactgctcggtgctgaccaacgatctggactccgcttccggcattgtcctggcggaaatcattgaggattgaggtacgcatggccgacgatcgaggcgacatcacccccatcggcgattgccgggtctgcagcttccgcatgagcctgctgctgaccggccgctgtacgccgggcgacgcctgcgtggcggtggagagcggacggcagatcgaccgtttcttccgcaataacccgcacttggccgtgcagtacctggccgatcccttctgggagcgccgcgccatcgccgtgcgctattcgccggtggaggcgctgaccccgttgattcgcgacagcgacgaggtggtgcgtcgggccgtcgcctaccggctgccccgcgagcagttgagtgcgctgatgttcgacgaggaccgcgaggtgcgcatcaccgtggccgatcgcctgccgcttgagcaactggagcagatggccgccgacagggattatctggtgcgcgcctatgtagtccagcgtatccctccggggcgcctgttccgtttcatgcgcgacgaggaccgccaggtgcgcaagctggtggccaagcgcctgcccgaggaaagcctgggtctcatgacccaggacccggagcccgaagtccggcgcatcgtcgcctcgcgcctgcgcggcgacgatttgctggagctgttgcacgacccggattggacggtacgcctggccgccgtggagcatgcgtcgctggaggcgctgcgtgaactcgacgagcccgatcccgaggtccgcctggcgatcgccgggcggctcggcatcgcctgatccccgcgtctgacgggcggaacggtttcgccggccgccccgccccccgcattgcccttcgtacccttgtcacctttcgcccagcgttgacgtgaatgcccgatgccggacgcctgcttgttgcaaacctgacaggaaggcgcgtttatgacaaaggctccccttggtaaacccttttaaatcaggcgcttgccttctggtacaggcattgcaatgatccgttgcaacatgctgcatcaacgaccagaggggtacgcgatgaaagccaaggatattgccgaactgctcgacgagcccgcctgcagtcacaacaagaaggaaaagtccggctgcgccaagcccaagccgggcgccaccgacggtggctgctccttcgacggcgcgcagatcgccctgctgcccgtcgccgacgtggcgcatatcgttcacgggccgatcgcttgcgccggcagttcctgggacaaccgcggcacccgctccagcgggccggacctgtaccgcatcggcatgaccaccgatctcaccgagaacgacgtgatcatggggcgcgccgagaagcgcctgttccatgccatccgccaggcggtggaaagctattcgccgccggcggtgttcgtctacaacacctgcgtgccggcgctgatcggcgacgacgtcgacgcagtgtgcaaagccgccgccgagcgcttcggcaccccggtcatcccggtcgactcggccggcttctacggcaccaagaacctcggcaaccgcatcgccggtgaggccatgctcaagtacgtgatcggcacccgcgagcccgatccgctgcccgtcggcagcgagcgtccgggcatccgcgtgcacgacgtcaacctgatcggcgagtacaacatcgccggcgagttctggcatgtcctgccgctgctcgacgaactgggcctgcgggtgctctgcaccctggccggcgatgcgcgctaccgcgaggtgcagaccatgcaccgcgccgaagtgaacatgatggtctgctccaaggccatgctcaatgtcgctcgcaagctgcaggaaacctacggcacgccctggttcgagggcagcttctacggcatcaccgacacctcccaggcgctgcgcgacttcgcccggctgctcgatgatcccgacctgaccgcccgcaccgaggcgctgatcgcgcgcgaggaggccaaggtccgcgccgccctcgaaccctggcgtgcgcgtctggagggcaagcgcgtgctgctctacaccggcggcgtgaagtcctggtcggtggtttccgccctgcaggacctgggcatgaaggtggtcgccaccggcaccaagaagtccaccgaggaagacaaggcacgcatccgcgaactgatgggcgacgacgtcaagatgctcgacgagggcaatgcgcgggtgctgctgaagaccgtcgacgagtaccaggccgacatcctcatcgccggcggacgcaacatgtacaccgcgctcaagggccgcgtgcccttcctcgacatcaaccaggagcgcgaattcggctatgccggctacgacggcatgctggaactggtgcgtcagctctgcatcaccctggaatgcccggtgtgggaggcggtgcgccgccccgcgccctgggacatccccgccagccaggacgccgcgccgagcgcgccggcccgttcggcgaacgcctgaggagaaccgcgatggccgagatcatcaatcgcaacaaggccctggccgtcagcccgctgaaggccagtcagaccatgggcgccgcgctggccatcctcggcctggcgcgcagcatgccgctgtttcacggctcgcagggttgcaccgcgttcgccaaggtgttcttcgttcgccatttccgcgagccggtcccgctgcagaccaccgccatggaccaggtcagttcggtgatgggcgccgacgagaacgtcgtcgaggcgctgaagaccatctgcgaacggcagaatccctcggtcatcggcctgctcaccaccggcctgtcggaaacccagggctgcgacctgcacaccgccctgcacgagttccgtacccagtacgaggagtacaaggacgtgccgatcgttccggtgaacacgccggacttcagcggctgcttcgagagcggcttcgccgcggcggtcaaggcgatcgtcgagacgctggtgcccgaacggcgcgatcaggtgggcaagcgtccgcgccaggtcaacgtgctgtgctcggccaatctcaccccgggcgatctggagtacatcgccgaaagcatcgagagcttcggtctgcgccccttgctgatccccgacctgtccggctcgctcgacggccacctggacgagaaccgtttcaatgccctgaccaccggcggactgagcgtggccgaactggccaccgccggacagagcgtcgccactctggtggtcgggcagagcctggcgggtgcggccgacgccctggccgagcgcaccggcgtgcccgaccggcgcttcggcatgctctacggtctggatgcggtcgatgcctggctgatggcgctggccgagatcagcggcaatccggtgcccgaccgctacaagcgccagcgtgcccaattgcaggacgccatgctcgacacccacttcatgctcagttccgcacgcacggccatcgccgccgatcccgatctgctgctcggtttcgatgccctgctgcgcagcatgggcgcgcacacggtagccgccgtggtgccggcccgggccgccgcgctggtcgattcgcctctgccctccgtgcgggtcggcgacctggaggacctcgagcatgccgcccgcgccggccaggcccaactggtgatcggcaacagccacgccctggccagcgcccgtcgcctcggtgtgccactgttgcgtgccggcttcccgcagtacgatctgctgggcggtttccaacgctgctggtccggctaccgcggcagcagtcaggtgctgttcgatctggccaacctgctggtcgaacaccaccagggtatccagccctatcattcgatctatgcgcaaaaaccggcaaccgaacagccgcaatggaggcactgaagcgatgtccagcccgacccgacaattgcaggtattggatagcgaggacgacggcaccctgctgaaggtcgccttcgcctcgtccgaccgcgaactggtcgaccagcatttcggctcctcgcgctccttcgccatctacggggtcaatcccgagcgctcccagctcctctcggtcgtcgagttcggcgagctggagcaggacggcaacgaggacaagctggccaggaagatcgatctgctcgacggctgcgttgccgtgtactgttgcgcctgcggcgcctcggcggtgcgccagttgatggccatcggcgtgcagccgatcaaggtgagcgaaggcgcgcgcatcgccgagctcatcgaagccctccaggtcgagttgcgcgaaggtccttcggcctggctggccaaggccatccagcgtacccgcggccccgacatgaggcgcttcgacgccatggccgccgaaggctgggacgaatagataattcgagttgcaggaaggtagcacccggaattgtgagcggataacaattccttggaattgtgagcggataacaattataattaagttgttaggagggaacttagatgtgggattattcggaaaaagtcaaagagcacttctacaaccccaagaatgctggagccgtggaaggcgccaacgccatcggcgacgtcggatcgctgagttgcggtgatgcgctgcgcctgaccctgaaggtggacccggaaaccgacgtgattctggatgccggcttccagaccttcggctgtggttccgccatcgcttcctcctcggcgctgaccgagatggtcaagggcctgaccctggacgaggcgctgaagatcagtaaccaggacatcgccgactacctcgatggcctgccgccggagaagatgcactgctcggtgatgggccgcgaagccctgcaggccgcggtggccaactaccgtggcgagacgatcgaggacgaccacgaagagggcgcgctgatctgcaagtgcttcgccgtcgacgaggtgatggtccgcgataccatccgtgccaacaagctgtctaccgttgaggacgtgaccaattacaccaaggccggcggtggctgctccgcctgccacgaggctatcgagcgcgtgctgaccgaagagctggccgctcgcggtgaagtcttcgtcgcggccccgataaaggccaagaagaaggtcaaggtgctcgcccccgagccggctcccgccccggtggccgaagccccggcggctgccccgaagctgagcaacctgcagcgcatccgtcgcatcgagaccgtgctggcggcgatccgtccgaccttgcagcgcgacaagggcgacgtcgaactgatcgatgtcgacggcaagaacgtttatgtcaagctcaccggcgcctgcaccggctgccagatggccagcatgaccctcggcggcatccagcagcgcctgatcgaggagctcggcgagttcgtcaaggtgattccggtcagcgctgcggctcacgcgcagatggaggtctgaaatggctgacgtctatctcgataacaacgccaccacccgggtggacgacgaaatcgtccaggccatgctgccgttcttcaccgaacagttcggcaacccctcgtcgctgcacagcttcggcaaccaggtcggcatggcgctgaagaaggcccgccagagcgtgcagaaactgctcggtgccgaacacgattcggaaatcgtcttcacctcctgcggcaccgagtcggactccaccgcgatcctctcggcgctcaaggcccagcccgaacgcaagaccgtcatcaccaccgtggtcgaacacccggccgtcctcagcctgtgcgattacctcgccagtgagggctacaccgtgcacaagctgccggtggacaagaaaggccgtctggatctggagcattacgccagcctgctgaccgacgatgtcgccgtggtgtcggtgatgtgggccaacaacgagaccggtaccctgttcccgatcgaagagatggcgcgcctggccgacgacgccggcatcatgtttcacaccgatgccgtgcaggccgtgggcaaggtaccgatcgacctgaagaattcgtcgatccacatgctttcgctgtcgggccacaagctgcacgcgcccaaaggtgtcggcgtgctctatctgcgccgcggcacccgcttccgtccgctgctgcgcggtggtcaccaggagcgcggccgtcgtgccggcaccgagaacgccgcctccatcatcggcctgggtgtcgccgccgaacgcgcgctgcagttcatggagcacgagaacaccgaggtcaagcgcctgcgcgacaagctggaggccggtatcctcgccgtcgtgccccatgccttcgtcaccggcgatccggacaaccgcttgcccaacaccgccaacatcgcgttcgagtacatcgagggcgaggccatcctgctgctgctgaacaaggtcggcatcgccgcctccagcggttcggcctgcacctccggctccttggagccctcccacgtgatgcgcgccatggacattccctatactgccgcccacggcaccgtgcgcttctccctgtcgcgctacaccaccgaggaggagatcgaccgggtgatccgcgaggttccgccgatcgtggcccagttgcgcaagctgtcgccctactggagcggcaacggtccggtggaggacccgggcaaggccttcgctccggtctacggctgagtcgccgccgtcctgcgggagcgtatcccgcgggaaatcgtccccaccccgcccgagttgttggagaaagccatggctagcgtgatcatcgacgacactaccctgcgtgacggtgaacagagtgccggggtcgccttcaatgccgacgagaagatcgctatcgcccgcgcgctcgccgaactgggcgtgccggagttggagatcggcattcccagcatgggcgaggaagagcgcgaggtgatgcacgccatcgccggtctcggcctgtcgtctcgcctgctggcctggtgccggctatgcgacgtcgatctcgcggcggcgcgctccaccggggtgaccatggtcgacctttcgctgccggtctccgacctgatgctgcaccacaagctcaatcgcgatcgcgactgggccttgcgcgaagtggccaggctggtcggcgaagcgcgcatggccgggctcgaggtgtgcctgggctgcgaggacgcctcgcgggcggatctggagttcgtcgtgcaggtgggcgaagtggcgcaggccgccggcgcccgtcggctgcgcttcgccgacaccgtcggggtcatggagcccttcggcatgctcgaccgcttccgtttcctcagccggcgcctggacatggagctggaagtgcacgcccacgatgatttcgggctggccacggccaacaccctggccgcggtgatgggcggggcgactcatatcaacaccacggtcaacgggctcggcgagcgtgccggcaacgccgcgctggaagagtgcgtgctggcgctcaagaacctccacggtatcgacaccggtatcgatacccgcggcatcccggccatctccgcgctggtcgagcgggcctcggggcgccaggtggcctggcagaagagcgtggtcggcgccggggtgttcactcacgaggccggtatccacgtcgacggactgctcaagcatcggcgcaactacgaggggctgaatcccgacgaactcggtcgcagccacagtctggtgctgggcaagcattccggggcgcacatggtgcgcaacacgtaccgcgatctgggtatcgagctggcggactggcagagccaagcgctgctcggccgcatccgtgccttctccaccaggaccaagcgcagcccgcagcctgccgagctgcaggatttctatcggcagttgtgcgagcaaggcaatcccgaactggccgcaggaggaatggcatgagtctgcttacgcaatggcgtgatgacatccgctgcgtcttcgagcgcgacccggcggcacgcaccaccttcgaggtgctcaccacctatccgggggtgcacgcgatcatcggctaccggctggccaatcgcctgtggcgtgccggctggcgctatccggcacgtctgctgtcgttcgtcgcccgcatgctgagcaacgtggacattcacccgggggcgaccatcggcgagcgtttcttcatcgatcacggcgcctgcgtggtgatcggcgaaaccgccgagatcggcaacgacgtgaccctctaccatggcgtgactctcggcggcaccagttggaacaagggcaagcgccatccgacgctgagggacggcgtgctggtgggcgcgggagccaagattctcggtcccatcaccgtgggcgcgggcgcccgggtgggggccaactccgtggtggtccaggatgtgccggacggttgcaccgtggtcggcatccccggcaaggtagtcaaggtgcgcgaggccggccgcccgaatccctatggcatcgacctcgaccatcacctgattccggacccggtgggcaaggccatcgcctgcctgctggagcgcatcgatgcgctggagaagcaggtcgaggcgggtgggctggtcaccgtcggcagccagcagcagttctaccaggtctgtaactccgacaacagcatttgcgagagcgactgcgccggtggcaccactgcgcaggctcaacaatcggccggtcgccgtcgggccgtacccactccggtggccgagtgatcgctggaaccacgggagacgactgagcatggacctgcaggacttcgacagcgacagcctgtactacgacgagccgctcgccccggaggtagcggcccgtctggccgcggccgccgaacagtatgccgagggcaccgccgagcagccgctgctcgaggcacaggccctcgccccggacgatctgacggtgctggtcggcctgtatcgcttctatttctaccagcaccgctatcaggacgctctgcagatcgcctggcgggtactggaggtggtcggtccccggctgctgctgcccgcggactggcgcgcgatcgatgccgggtatctcgcggcggcatccgagcggggcatcgcgctcctgcgtttctatctgctggcgctcaagggtgccggctatctgaacctgcgtctgggccggttcgagcagggcaaggccatgctcgccaaggtcgtcgagctggacacggaaaaccgcctgggagccaggctgttgttggacgtgctggccgaacacagcgctgaaatcctgattttccccactgcggccaacgcggagataagaccatgaccgtgcaacccttttccccggattccgacctgaccctggacgaggccatggacgagctggtctcggccgaggacttcctcgagttcttcggtgtgcccttcgatcaggatgtcgtgcatgtcaaccggctgcacatcatgcaacgctaccacgactacctgagcaaggccggcgatctggacgagcacgacgaccaggcccgctacgcggtgttccagaagctgctggcgcgcgcctatctggacttcgtcgagtccgatgccctgaccgagaaggtcttcaaggtgtttcgcatgcacgaaccgcagaagaccttcgtttccatcgaccaactgttgagctgagcttaagaggggaggcgccatgctgccgcagtttgaatatggtgatgaggttcgcctgattcgcaacgtgcgtaacgacggcacctatccgggcatgaataccggcgccctgctgatgcgccgtggcgcggtgggttgcgtctatgacgtcggtacttatctgcaggatcaattgatctatcgcgtgcacttcctcgacgaaggacgcaccatcggctgccgcgaggaggagctgatcctcgcctcggctccctggattcccaaccttttcgagttccgcgacgatgtgatcgccacccgcagtcttgccgtgcgcggccaggtgctggtgaagcgtggccagctcggcagcatcatgaaggtgctgcgcgacgagcccgagctcggcatccagtaccatgtccacttcggcgacggtctggtattgcaggtgcccgagcagagcctggcgatggccgactccacggcggccatcgaggaggtgctcgatggcatctgagcgtctcgccgacggcgacagccgctattacttgctgaaggtcgcccacgagcagttcggctgcgcgcccggcgagctcagcgaggagcagctccagcaggccgaccgcatcatcggccggcagaggcatatcgaggacgccgtgttgcgcagccccgatgcgatcggtgtggtgatcccgccctcccagctcgaagaggcctgggcacacatcgccagccgctacgagagtcccgaggcgctacagcaggccctcgacgcgcaggcgctggatgctgccggcatgcgcgccatgctggcccgggagctcagggtcgaggccgttctcgactgcgtctgcgccggcctgccggagatcagcgacaccgatgtgagcctctactacttcaaccacgccgagcaattcaaggtgcccgcccagcacaaggcccggcacatcctggtcaccatcaacgaggattttccggaaaacacccgcgaagccgcccggacgcgcatcgagaccatcctcaagcggctgcgcggcaagccggagcgcttcgccgagcaggcgatgaagcactccgaatgtcccaccgcgatgcagggcggattgctcggcgaggtggtcccgggaacgctttatcccgaactggacgcctgcctgttccagatggcgcggggagaactgagtccggtactggaatcgccgatcggttttcacgtgctgtactgcgaaagcgtgagccccgcccggcagctcaccctcgaggagatcctgccgcgtctgcgcgacaggctgcagctccggcagcgcaaggcgtatcagcgcaaatggctggaaagcctgctccaacaaaacgctactttggagaacctcgcccatggataaaacggacaaaccctgctgctcgttctgcggcgcggagaagagcccgaccgttccgctgatcgccggcaacgacgggcgaatctgcgaagcctgcgtcaagcttgcccatcaggtggtcagcagctgggggcagcggcgcaagaaccagcagctggctccgcagctacgcacccccgtggaatacaagaagcacctggacgagtcggtgatcggtcaggaggcagccaaggagaccctgtcggtcgcggtctacaaccactacctgcgcttgctcaactgcgatcgcgaaccggtctgccaactgggcgagcaggtcgaactggagaaatccaacatcctcatggccggcccttcgggtaccggcaagaccctgctggtgcgtaccctggcgcgcattctcggggttcccttcgccatggccgatgccaccaccctgacccaggccggctatgtcggcgatgacgtcgacagcatcatcacccgtctgctcgatgcggccggcggcgacgtgcagcaggcgcagtggggcatcgtctatatcgacgaggtggacaagctggccaagcgcagcgggggcggtacggcggtgcgcgacatctccggcgaaggggtacagcaggccctgctgaagatggtcgaaggcaccgaggtgcgcatcagcaagtccgggcgacgcaacgagcacagcgaggagcaggtggtggacacccgcaatatcctgttcatcgccggcggtgccttccccgggttggaagcactggtctcgagccgcatccagccgaagaacaccggtatcggtttccatgcccagccgcgtcgggaggccccttcgatcaacgagctgatggcctcgctgctaccggacgacctgcacgagttcggcctgattcccgaattcatcggtcgtttcccgatcatcaccttcctgcaggaactcgaccacgccaccctgctgcgtatcctcaccgagccgcgcaatgcactggtcaaacagtacaagcagttgttcgcctatcagggcgtcgaactggtgatcaccgatgcggccctcaactacatcgccgaccaggcgctgattcgcaagaccggtgcccgcggattgcgcgctgtactggaagccgccctgcagcagaccatgttcaacatgccctcgcagccacaactgcgcggttgtacgctggatctggtcgagcatgaggatggcggccgctctctggaggttctgacccgactggccgaagatggcagcggacggattcagcccgatccatctccggtagtggaggaaaaatccgcgctgtcggccgacctctgaggaggtcgtaaagaactgttgtaaaaacgacaaggcctgcctgcccgccccattcttatcgtcgcatttgcgacaggattttttactgccataaaaaatgcttttaaatcaataagttggtaaatgtgttcggggtttggggagtggtctgcttcttgctgttactcaccggccagccaggtgtacaagcccggagactggcgctccgaccacgaatctcatgcatgcagccagaggttaagttatggccaagattggactcttcttcggtagcaacaccggtaaaacccgcaaggtcgccaagtcgatcaagaagcgtttcgacgacgaaaccatgtccgatgcgctgaacgtcaaccgtgtttccgcggaagacttcgcccagtaccagttcctgattctgggtactccgacccttggcgaaggcgaactccccggtctgtcctccgactgcgaaaacgaaagctgggaagaattcctgccgaagatcgagggcctggatttcagcggcaagaccgtggcgctgttcggcctgggcgatcaggttggctatcccgagaattacctggatgccctgggcgaactgtattccttcttcaaggaccgtggcgccaagatcgtaggctcctggtcgaccgacggctacgagttcgaaagctccgaggccgtggttgacggcaagttcgtcggcctggcgctggatctggacaatcagagcggcaagaccgacgagcgcgttgctgcctggctggcacagatcgctcccgagttcgggctgtccctgtaacggcaaacgagtgaaggaactagcacccggaattgtgagcggataacaattccttggaattgtgagcggataacaattataattaagttgttaggagggaacttagatgattataaaaaagaatcactttgatttagacaaattctttatatgctttttttcaatattcgtaataatatatttagttattttatgtttccctattgtttctgtcgtaaaatattctggaatatctaacataatatccacacttcaaaatcacgaaagtttatccgcaataaagctgagttttcaaacttctttgacatcactgcttcttacttttattcttggtactccaactgtatttttcatagttcttaataagaaacaccttttagcaaagttagttgatttaattatagaaatccctatcactcttccgccagctgctgctggaattgcactccttctcgcatttggtaaaaatggcttactaaaaaatttgttttctatttacaatatacaacttacttttactcccatagcagttataatagctcaattttttgtttcttctatatactatatacaggttttggaaacttctctttcagcagtcccaattgaaatttttgaagcttcatatgtatcaggctgtggcaaagtaggaacagccattagagttattattcctatgttaaaaaaatcaataatatcaggattaattttaacttggattagatctatgggcgagtttggtgcaacaattgtatttgctggaaacgtacttggcaaaacaacaactatgcctcttttcatctacactttaatgcaaacaaacatagttaaagctgctgctttttctctggtgctttatataatttcctttataatactacttttaattaaaacctggtgttctaacaatgattagggagacaacggatggcaaaaaagttgaaaaccatggatggaaatgaagctgcagcttacgcttcttatgcctttacagatgtagctgcaatttatcctataacaccatccactccaatggcagagctagttgataactggtcatctcatggaagaaaaaacatcttcgggcagcctgttaaaatagttgaaatgcaatcagaggctggtgcagctggaactgttcacggttccttgattgcaggtgcacttacaactacatacactgcttctcaaggtcttcttttaatgataccaaacatgtataaaatggctggagaacttctaccctgcgtattccatgtaagtgctcgtgctattgcaactcacgctttatctatatttggagaccatcaggacgtcatggctgcaagacaaacaggttttgttctcttagcctcttcaaacgttcaagaggtcatggatttagctatggtatcacacttagctgctattaaagcaagagtgccattcatgcacttctttgacggttttagaacatcacatgaatatcaaaaaatagaaatgattgattacaatgatgtagctcctctagttgactacgaatcaattaaggcttttaggtctagagctcttaacccagaacatcctactgttcgtggtacagctcaaaatcctgatatctacttccagggcagagaagcttcaaacaatttctacactgcagttcctgatatcgtagaaagctatatgagagaaatagaaaagataactggaagagtatatcatccttttgattactatggcgaccctgaagcagaggatataattattgccatgggttcagtttgtgatacagttgaggaaactgtagattatttaaggagtaagggacaaaaagttggattgttgaaggttcatttatatagaccattctctactgactacttctttaaatatcttcctaaaactattaaaagaattgcagttctagacagaacaaaggaacctggttcagccggagaacctctttatctagatgtagttaatgccttttataaccatccaaataaacctgtcatagttggaggacgttttggtttaggttctaaagacacacgaccatcacaaattttatctgtatttgataacttaagagctcaaagccctaaaaatagatttaccattggaattgtggatgatgtttcaaatacatctctacctgaaggtgaaataatcgatactacacctcaaggaactataagatgtaaattctatggtttaggctctgatggtacagttggtgcaaacaaaagtgctataaaaatcataggtgataataccgatatgtactgtcaggcttacttctcctatgacagtaaaaagtctggaggaagtactgtttctcacttaagattcggaaataaacctattaaatccccttatcttgtttatgaagcagactacattgcctgccacaataaatcctttatatataatataaatgtgttaaaaggattaaagaagaacggaatttttgttctcaactgtccatttaaagataacgaacttgatgaacatcttcctaatgcaatgaaaaaatatattgcagacaacaacatacaattttacaccatagacgcagtttcaatagctcaagaggtaggtcttggttctagaataaacatgattatgcagtctgctttctttaaactagctaacataataccagtggataaggctgttcagtatttgaaagattctatagaatacacttacggtaaaaaaggtgctactatagttgatgcaaataaaaaagctgtagatgccggagttaacgcagctcacaaagttactgttcctgaagcctggaaaaatgctgaatccaactatcaacctttaaaaggtcttcccgatttcgttcaaagaattgaaagacctatggcaaggcatgaaggtgacgaactacctgtaagtgcttttaaaggcatggaagatggtgtatttcctcttggtataaccgcttatgaaaagcgtggaattgcagttaacgtcccagaatggcaaatagacaaatgtattcaatgtaaccagtgtgcatatgtttgtcctcacagtgtaataagagcttgtttacttgatgatgaggaaaaagaaaatgctcctgaaagattcgttaccaagaagcctgtaggtaaaggcctcgaacacctacactacaaaatccaaataagtccacttgactgtactggttgcggaaattgtgcggatatatgtcctgctccaggtaaagctttaattatgaagcctgctgcagaacaaatagaagaacaatcagaaaacttcgaatatgccttaaaggtaaaacctaaggaaggtataatggatattcatactgtaaagggaagtcaattttctagaccacttctagaatttaacggagcttgtcccggctgtggtgaaacaccttatattaaactattaacacagctttatggagatagaatgatgatagcaaacgctactggatgctcatctatttggggtgcaagtgcaccttcaattgcatacaccacaaataacttcggaaaaggtccttcttggggtaactcattatttgaggataatgcagagtacggttacggaatgtttttaggcgttaagcaaatgagagaaagattggctgaactaatggaagaagctattaattcaaatataaattctgatcttaaggatgcttttagcttgtggctagatggctttgatgacggcgataaatccaaggaagcatcaaataaaatccttagaatcatggaaaacgaggacttcaagggtgataaattattatctgaaatatatgataagaaagattatttagttaagaaatcccactggttaattggaggagacggttgggcatatgatataggcttcggcggagtagatcaagtgcttgctttaggtgatgatgtaaatatatttgtaatggatactgaaatatactctaatactggtggtcaatcctcaaaatccacaccaactggagcaattgcaaaattcgcttcagcaggtaaaaaaacacgaaaaaaagatcttggcttaatggctatgacttatggaaatgtctatgtaactcaaatagctatgggagcaaacatgacccacactattaaagcaattactgaagccgaagcctacaaaggtccttctttagtaatagcttatgcaccatgtataagccacggtattaaaactggtatgggcaccagcatagctcaagagaaaaaagctgttgaagcaggatactggcatttatacagatacaatcctcttctaaaagagcagggaaaaaatccatttatacttgattcaaaagagccaacagaatcctatacagactttataaatggagaacttcgttactcttcacttaagactatcttccctgataaggttgaagatgcatttaataagtcagcagaaaatgcaaaggaaagatactctctttataaaaaattatcagaattacagtaactttgcctccttccgttcatccttgccggaaacctctcccatgcgaatcgccctggcccccatggagggattggtcgacgaactgcttcgtgacttgctgacccgcgtcggcggtatcgactggtgcgtgaccgaattcgtccgggtctgcgaccgtctgctgccggtcgcccagttcgagaaactggctccggagctgcggcatggctggcggacccgggccggcacgccgatgcatctgcaactgctcggttccgatccggcatgcctggccgagaacgcggcgctggcggccgaattgggcgcgccggcgatcgatctcaacttcggttgcccggcgaagacggtcaaccgctcgcggggcggagcggtgctgctcgacgagccggaactgctgcatgccatcgtccgcgaggtgcgccgggccgtgccggcgcatgtgccggtgaccgccaagatgcgcctggggtacgcccggcccgagggcgccctggagtgcgcccgcgcgctggtcgagggcggcgtcgcacatctggtggtgcacgcacggaccaaggtcgagggctaccggccgccggcccattgggaatggctggcgcgggtgcgggaggcggttgccgtgccggtctatgccaacggcgaaatctggacgccggcggattggctgcgctgccgggaaatcagcggggtggaggatgtcatgctcggccgcggcctggtttcgcgccccgatctggcccggcagatcgccatggcgtgcgccggacgcacgctcgagccgcagggctggggtgaggtacagccgctggtgcgcgagttctggcggcgcgcccggcagcggatcgcgccgcgctacgcgcctggccggctcaagcagtggctgggcatgctggcgcgcagttatccggaggcggccgcgctgttcgccgaactgcgccgggagaacgactgcgggcggctggatgccctgctgggcgtagagttgcgcggtattttcccggatctgtgtccggcgctctgaatgtgagcaataaaaataagaagcctgcatttgcaggcttcttatttttaaggccagcaaaaggccaggaaccgtaaaaaggccgcgttgctggcgtttttccataggctccgcccccctgacgagcatcacaaaaatcgacgctcaagtcagaggtggcgaaacccgacaggactataaagataccaggcgtttccccctggaagctccctcgtgcgctctcctgttccgaccctgccgcttaccggatacctgtccgcctttctcccttcgggaagcgtggcgctttctcatagctcacgctgtaggtatctcagttcggtgtaggtcgttcgctccaagctgggctgtgtgcacgaaccccccgttcagcccgaccgctgcgccttatccggtaactatcgtcttgagtccaacccggtaagacacgacttatcgccactggcagcagccactggtaacaggattagcagagcgaggtatgtaggcggtgctacagagttcttgaagtggtggcctaactacggctacactagaagaacagtatttggtatctgcgctctgctgaagccagttaccttcggaaaaagagttggtagctcttgatccggcaaacaaaccaccgctggtagcggtggtttttttgtttgcaagcagcagattacgcgcagaaaaaaaggatctcaagaagatcctttgatcttttctacggggtctgacgctcagtggaacgaaaactcacgttaagggattttggtcatgagattatcaaaaaggatcttcacctagatccttttaaattaaaaatgaagttttaaatcaatctaaagtatatatgagtaaacttggtctgacagctcttcctttttcaatattattgaagcatttatcagggttattgtctcatgagcggatacatatttgaatgtatttagaaaaataaacaaataggggttccgcgcacatttccccgaaaagtgccacctg

SEQ ID NO: 5 - DNA, 10216 bp, artificial sequence
  plasmid SG123
acggtcctgcatcagctcttatatattaagctaccaacttagtatataagccaaaacttaaatgtgctaccaacacatcaagccgttagagaactctatctatagcaatatttcaaatgtaccgacatacaagagaaacattaactatatatattcaatttatgagattatcttaacagatataaatgtaaattgcaataagtaagatttagaagtttatagcctttgtgtattggaagcagtacgcaaaggcttttttatttgataaaaattagaagtatatttattttttcataattaatttatgaaaatgaaagggggtgagcaaagtgacagaggaaagcagtatcttatcaaataacaaggtattagcaatatcattattgactttagcagtaaacattatgacttttatagtgcttgtagctaagtagtacgaaagggggagctttaaaaagctccttggaatacatagaattcataaattaatttatgaaaagaagggcgtatatgaaaacttgtaaaaattgcaaagagtttattaaagatactgaaatatgcaaaatacattcgttgatgattcatgataaaacagtagcaacctattgcagtaaatacaatgagtcaagatgtttacataaagggaaagtccaatgtattaattgttcaaagatgaaccgatatggatggtgtgccataaaaatgagatgttttacagaggaagaacagaaaaaagaacgtacatgcattaaatattatgcaaggagctttaaaaaagctcatgtaaagaagagtaaaaagaaaaaataatttatttattaatttaatattgagagtgccgacacagtatgcactaaaaaatatatctgtggtgtagtgagccgatacaaaaggatagtcactcgcattttcataatacatcttatgttatgattatgtgtcggtgggacttcacgacgaaaacccacaataaaaaaagagttcggggtagggttaagcatagttgaggcaactaaacaatcaagctaggatatgcagtagcagaccgtaaggtcgttgtttaggtgtgttgtaatacatacgctattaagatgtaaaaatacggataccaatgaagggaaaagtataatttttggatgtagtttgtttgttcatctatgggcaaactacgtccaaagccgtttccaaatctgctaaaaagtatatcctttctaaaatcaaagtcaagtatgaaatcataaataaagtttaattttgaagttattatgatattatgtttttctattaaaataaattaagtatatagaatagtttaataatagtatatacttaatgtgataagtgtctgacagtgtcacagaaaggatgattgttatggattataagcggccggccagtgggcaagttgaaaaattcacaaaaatgtggtataatatctttgttcattagagcgataaacttgaatttgagagggaacttagatggtatttgaaaaaattgataaaaatagttggaacagaaaagagtattttgaccactactttgcaagtgtaccttgtacctacagcatgaccgttaaagtggatatcacacaaataaaggaaaagggaatgaaactatatcctgcaatgctttattatattgcaatgattgtaaaccgccattcagagtttaggacggcaatcaatcaagatggtgaattggggatatatgatgagatgataccaagctatacaatatttcacaatgatactgaaacattttccagcctttggactgagtgtaagtctgactttaaatcatttttagcagattatgaaagtgatacgcaacggtatggaaacaatcatagaatggaaggaaagccaaatgctccggaaaacatttttaatgtatctatgataccgtggtcaaccttcgatggctttaatctgaatttgcagaaaggatatgattatttgattcctatttttactatggggaaatattataaagaagataacaaaattatacttcctttggcaattcaagttcatcacgcagtatgtgacggatttcacatttgccgttttgtaaacgaattgcaggaattgataaatagttaacttcaggtttgtctgtaactaaaaacaagtatttaagcaaaaacatcgtagaaatacggtgttttttgttaccctaagtttgttaagggatgcataaactgcatcccttaacttgtttttcgtgtacctattttttgtgaatcgattatgtcttttgcgcattcgtcgacaattgcatatattgataaaaataataatagtgggtataattaagttgttaggaggttagttagagtgaaaccagtaacgttatacgatgtcgcagagtatgccggtgtctcttatcagaccgtttcccgcgtggtgaaccaggccagccacgtttctgcgaaaacgcgggaaaaagtggaagcggcgatggcggagctgaattacattcccaaccgcgtggcacaacaactggcgggcaaacagtcgttgctgattggcgttgccacctccagtctggccctgcacgcgccgtcgcaaattgtcgcggcgattaaatctcgcgccgatcaactgggtgccagcgtggtggtgtcgatggtagaacgaagcggcgtcgaagcctgtaaagcggcggtgcacaatcttctcgcgcaacgcgtcagtgggctgatcattaactatccgctggatgaccaggatgccattgctgtggaagctgcctgcactaatgttccggcgttatttcttgatgtctctgaccagacacccatcaacagtattattttctcccatgaagacggtacgcgactgggcgtggagcatctggtcgcattgggtcaccagcaaatcgcgctgttagcgggcccattaagttctgtctcggcgcgtctgcgtctggctggctggcataaatatctcactcgcaatcaaattcagccgatagcggaacgggaaggcgactggagtgccatgtccggttttcaacaaaccatgcaaatgctgaatgagggcatcgttcccactgcgatgctggttgccaacgatcagatggcgctgggcgcaatgcgcgccattaccgagtccgggctgcgcgttggtgcggacatctcggtagtgggatacgacgataccgaagacagctcatgttatatcccgccgttaaccaccatcaaacaggattttcgcctgctggggcaaaccagcgtggaccgcttgctgcaactctctcagggccaggcggtgaagggcaatcagctgttgcccgtctcactggtgaaaagaaaaaccaccctggcgcccaatacgcaaaccgcctctccccgcgcgttggccgattcattaatgcagctggcacgacaggtttcccgactggaaagcgggcagtgagcgcaacgcaattaatgtaagttagctcactcattaggcaccgggatctcgaccgatgcccttgagagccttcaacccagtcagctccttccggtgggcgcggggcatgactagcatgatcgtgctcctgtcgttgaggacccggctaggctggcggggttgccttactggttagcagaatgaatcaccgatacgcgataacttcgtataatgtatgctatacgaacggtagctcagctagcacccggaattgtgagcggataacaattccttggaattgtgagcggataacaattataattaagttgttaggagggaacttagatgtgtgctactagtagtcagtttactcaaatcactgaacataattcgagaagaagtgctaattaccaacctaatctatggaatttcgagtttcttcaaagtttggaaaatgatttgaaggttgaaaaactagaagagaaagctacaaagttagaagaagaagttaggtgtatgatcaatcgagttgatactcaacctttatccttacttgaattaatagatgatgttcaaagattaggacttacctataagtttgagaaagacataatcaaagcgttagagaacatagtactattagacgaaaacaaaaagaataagtctgatttacatgctacagcactttcgtttagacttctaagacaacatggttttgaagttagtcaagatgtatttgagagatttaaagataaagaaggtggattttcaggagagttaaaaggtgatgttcaaggtttgttaagtctgtatgaagcatcttatttgggatttgaaggagaaaacctgttagaagaagctagaacattttcgataactcatctgaaaaataacctcaaagaaggaatcaacacaaaagttgctgaacaagtttctcatgcattagagttaccttatcatcagagattacatcgattagaagcaagatggtttttggacaaatacgaacctaaagaacctcatcatcagctcttgttagaacttgcaaagttagattttaatatggtccaaacattacaccaaaaggaattacaggatctaagtagatggtggactgaaatgggtttagctagtaaacttgactttgttagagacagattaatggaagtgtatttttgggcattaggaatggctcctgatccacaatttggtgaatgtagaaaagctgtaacgaaaatgttcggattagtaacgattatagatgatgtctatgatgtttacggtactttagatgaattgcaactctttacagatgcagttgaaagatgggatgtaaatgcaatcaatacgttaccagattacatgaagttatgctttttagcgttgtataataccgtcaatgatacttcatattccatacttaaggaaaaaggccacaataatctttcctatttaaccaagtcatggagagaattatgtaaggcatttttacaggaagcaaaatggtctaacaataaaataatcccagcattctctaaatatcttgaaaatgcttccgtatcatcttcaggagttgcattattagcaccatcttattttagcgtttgtcaacaacaagaagatatcagtgatcatgctctaagatccttaactgattttcatggattagtcagaagttcatgtgttatattccgtctttgtaatgatttagctacaagtgcagctgaattagaaagaggtgaaactacgaatagtattatatcctatatgcacgaaaatgatggaacaagtgaagaacaagctagagaagaattacgcaagttaattgatgcagaatggaagaaaatgaatcgtgaaagagtatctgatagcacattattacccaaagcttttatggagattgcagtaaatatggctagagtaagtcattgcacatatcagtatggagatggattaggtagacctgattatgctacagaaaatcgcataaaactcttattaatagatcctttcccaatcaatcagctaatgtatgtttagttaaggggcgccacaaacgagtgacaggagggaacttagatgcaaacggaacacgtcattttattgaatgcacagggagttcccacgggtacgctggaaaagtatgccgcacacacggcagacaccctcttacatctcgcgttctccagttggctgtttaatgccaaggggcaattattagttacccgccgcgcactgagcaaaaaagcatggcctggcgtgtggactaactcggtttgtgggcacccacaactgggagaaagcaacgaagacgcagtgatccgccgttgccgttatgagcttggcgtggaaattacgcctcctgaatctatctatcctgactttcgctatcgcgccaccgatccgaatggcattgtggaaaatgaagtgtgtccggtatttgccgcacgcaccaacagtgcgttacagatcaacgatgatgaagtgatggattatcaatggtgtgatttagcagatgtattacacggtattgatgccacgccgtgggcgttcagtccgtggatggtaatgcaggcagccaatagtgaagcaagaaaattgttgtctgctttcgcgcagcacaattaaaaaaccccgacatttgccgggctagcaggaggaattaacatggcaaccactcatttggatgtttgcgccgtggttccggcggccggatttggccgtcgaatgcaaacggaatgtcctaagcaatatctctcaatcggtaatcaaaccattcttgaacactcggtgcatgcgctgctggcgcatccccgggtgaaacgtgtcgtcattgccataagtcctggcgatagccgttttgcacaacttcctctggcgaatcatccgcaaatcaccgttgtagatggcggtgatgagcgtgccgattccgtgctgacaggtttgaaagccgctggcgacgcgcagtgggtattggtgcatgacgccgctcgtccttgtttgcatcaggatgacctcgcgcgattgttggcgttgagcgaaaccagccgcacgggggggatcctcgccgcaccagtgcgcgatactatgaaacgtgccgaaccgggcaaaaatgccattgctcataccgttgatcgcaacggcttatggcacgcgctgacgccgcaatttttccctcgtgagctgttacatgactgtctgacgcgcgctctaaatgaaggcgcgactattaccgacgaagcctcggcgctggaatattgcggattccatcctcagttggtcgaaggccgtgcggataacattaaagtcacgcgcccggaagatttggcactggccgagttttacctcacccgaaccatccatcaggagaatacataatgcgaattggacacggttttgacgtacatgcctttggcggtgaaggcccaattatcattggtggcgtacgcattccttacgaaaaaggattgctggcgcattctgatggcgacgtggcgctccatgcgttgaccgatgcattgcttggcgcggcggcgctgggggatatcggcaagctgttcccggataccgatccggcatttaaaggtgccgatagccgcgagctgctacgcgaagcctggcgtcgtattcaggcgaagggttatacccttggcaacgtcgatgtcactatcatcgctcaggcaccgaagatgttgccgcacattccacaaatgcgcgtgtttattgccgaagatctcggctgccatatggatgatgttaacgtgaaagccactactacggaaaaactgggatttaccggacgtggggaagggattgcctgtgaagcggtggcgctactcattaaggcaacaaaatgataagaagaggaggcagtgtatgagttttgatattgccaaatacccgaccctggcactggtcgactccacccaggagttacgactgttgccgaaagagagtttaccgaaactctgcgacgaactgcgccgctatttactcgacagcgtgagccgttccagcgggcacttcgcctccgggctgggcacggtcgaactgaccgtggcgctgcactatgtctacaacaccccgtttgaccaattgatttgggatgtggggcatcaggcttatccgcataaaattttgaccggacgccgcgacaaaatcggcaccatccgtcagaaaggcggtctgcacccgttcccgtggcgcggcgaaagcgaatatgacgtattaagcgtcgggcattcatcaacctccatcagtgccggaattggtattgcggttgctgccgagaaagaaggcaaaaatcgccgcaccgtctgtgtaatcggcgatggtgcgattaccgcaggcatggcgtttgaagcgatgaatcacgcgggcgatatccgtcctgatatgctggtggttctcaacgacaatgaaatgtcgatttccgaaaatgtcggcgcgctcaacaaccatctggcgcagctgctttccggtaagctttactcttcactgcgcgaaggcgggaaaaaagttttctctggcgttccgccaattaaagagctgctcaaacgcaccgaagaacatattaaaggcatggtagtgcctggcacgttgtttgaagagctgggctttaactacatcggcccggttgacggtcacgatgtgctggggcttatcaccacgcttaagaacatgcgcgacctgaaaggcccgcagttcctgcatatcatgaccaaaaaaggtcgtggttatgaaccggcagaaaaagacccaatcactttccacgccgtgcctaaatttgatccctccagcggttgtttgccgaaaagtagcggcggtttgccgagctattcaaaaatctttggcgactggttgtgtgaaacggcagcgaaagacaacaagctgatggcgattactccggcaatgcgtgaaggttccggcatggtcgagttttcacgtaaattcccggatcgctacttcgacgtggcaattgccgagcaacacgcagtgacctttgccgccggtctggcgattggtgggtacaaacccattgtcgcgatttactccactttcctgcaacgcgcctatgatcaggtgctgcatgacgtggcgattcaaaagctaccggtcctgttcgccattgaccgcgcgggcattgttggtgctgacggtcaaactcaccagggcgcttttgatctctcttacctgcgctgcataccagaaatggtcattatgaccccgagcgatgaaaacgaatgtcgccagatgctctataccggctatcactataacgatggcccgtccgcggtgcgctacccgcgcggcaacgcggttggcgtggaactgacgccgctggaaaaactaccaattggcaaaggcattgtgaagcgtcgtggcgagaaactggcgatccttaactttggtacgctgatgccagaagcggcgaaagtcgccgaatcgctgaacgccacgctggtcgatatgcgttttgtgaaaccgcttgatgaagcgttaattctggaaatggccaccagccatgaagcgctggtcaccgtagaagaaaacgccattatgggcggcgcaggtagcggagtgaacgaagtgctgatggcccatcgtaaaccagtacccgtgctgaacattggtctgccggacttctttattccgcaaggaactcaggaagaaatgcgcgccgaactcggcctcgatgccgccggtatggaagccaaaatcaaggcctggctggcataatccctactccactcctgctatgcttaacaaattattcatagactctaaataattcgagttgcaggaaggcggcaaacgagtgaaggaacatgtgagcaataaaaataagaagcctgcatttgcaggcttcttatttttaaggccagcaaaaggccaggaaccgtaaaaaggccgcgttgctggcgtttttccataggctccgcccccctgacgagcatcacaaaaatcgacgctcaagtcagaggtggcgaaacccgacaggactataaagataccaggcgtttccccctggaagctccctcgtgcgctctcctgttccgaccctgccgcttaccggatacctgtccgcctttctcccttcgggaagcgtggcgctttctcatagctcacgctgtaggtatctcagttcggtgtaggtcgttcgctccaagctgggctgtgtgcacgaaccccccgttcagcccgaccgctgcgccttatccggtaactatcgtcttgagtccaacccggtaagacacgacttatcgccactggcagcagccactggtaacaggattagcagagcgaggtatgtaggcggtgctacagagttcttgaagtggtggcctaactacggctacactagaagaacagtatttggtatctgcgctctgctgaagccagttaccttcggaaaaagagttggtagctcttgatccggcaaacaaaccaccgctggtagcggtggtttttttgtttgcaagcagcagattacgcgcagaaaaaaaggatctcaagaagatcctttgatcttttctacggggtctgacgctcagtggaacgaaaactcacgttaagggattttggtcatgagattatcaaaaaggatcttcacctagatccttttaaattaaaaatgaagttttaaatcaatctaaagtatatatgagtaaacttggtctgacagctcttcctttttcaatattattgaagcatttatcagggttattgtctcatgagcggatacatatttgaatgtatttagaaaaataaacaaataggggttccgcgcacatttccccgaaaagtgccacctg

SEQ ID NO: 6 - DNA, 10201 bp, artificial sequence
  plasmid SG124
acggtcctgcatcagctcttatatattaagctaccaacttagtatataagccaaaacttaaatgtgctaccaacacatcaagccgttagagaactctatctatagcaatatttcaaatgtaccgacatacaagagaaacattaactatatatattcaatttatgagattatcttaacagatataaatgtaaattgcaataagtaagatttagaagtttatagcctttgtgtattggaagcagtacgcaaaggcttttttatttgataaaaattagaagtatatttattttttcataattaatttatgaaaatgaaagggggtgagcaaagtgacagaggaaagcagtatcttatcaaataacaaggtattagcaatatcattattgactttagcagtaaacattatgacttttatagtgcttgtagctaagtagtacgaaagggggagctttaaaaagctccttggaatacatagaattcataaattaatttatgaaaagaagggcgtatatgaaaacttgtaaaaattgcaaagagtttattaaagatactgaaatatgcaaaatacattcgttgatgattcatgataaaacagtagcaacctattgcagtaaatacaatgagtcaagatgtttacataaagggaaagtccaatgtattaattgttcaaagatgaaccgatatggatggtgtgccataaaaatgagatgttttacagaggaagaacagaaaaaagaacgtacatgcattaaatattatgcaaggagctttaaaaaagctcatgtaaagaagagtaaaaagaaaaaataatttatttattaatttaatattgagagtgccgacacagtatgcactaaaaaatatatctgtggtgtagtgagccgatacaaaaggatagtcactcgcattttcataatacatcttatgttatgattatgtgtcggtgggacttcacgacgaaaacccacaataaaaaaagagttcggggtagggttaagcatagttgaggcaactaaacaatcaagctaggatatgcagtagcagaccgtaaggtcgttgtttaggtgtgttgtaatacatacgctattaagatgtaaaaatacggataccaatgaagggaaaagtataatttttggatgtagtttgtttgttcatctatgggcaaactacgtccaaagccgtttccaaatctgctaaaaagtatatcctttctaaaatcaaagtcaagtatgaaatcataaataaagtttaattttgaagttattatgatattatgtttttctattaaaataaattaagtatatagaatagtttaataatagtatatacttaatgtgataagtgtctgacagtgtcacagaaaggatgattgttatggattataagcggccggccagtgggcaagttgaaaaattcacaaaaatgtggtataatatctttgttcattagagcgataaacttgaatttgagagggaacttagatggtatttgaaaaaattgataaaaatagttggaacagaaaagagtattttgaccactactttgcaagtgtaccttgtacctacagcatgaccgttaaagtggatatcacacaaataaaggaaaagggaatgaaactatatcctgcaatgctttattatattgcaatgattgtaaaccgccattcagagtttaggacggcaatcaatcaagatggtgaattggggatatatgatgagatgataccaagctatacaatatttcacaatgatactgaaacattttccagcctttggactgagtgtaagtctgactttaaatcatttttagcagattatgaaagtgatacgcaacggtatggaaacaatcatagaatggaaggaaagccaaatgctccggaaaacatttttaatgtatctatgataccgtggtcaaccttcgatggctttaatctgaatttgcagaaaggatatgattatttgattcctatttttactatggggaaatattataaagaagataacaaaattatacttcctttggcaattcaagttcatcacgcagtatgtgacggatttcacatttgccgttttgtaaacgaattgcaggaattgataaatagttaacttcaggtttgtctgtaactaaaaacaagtatttaagcaaaaacatcgtagaaatacggtgttttttgttaccctaagtttgttaagggatgcataaactgcatcccttaacttgtttttcgtgtacctattttttgtgaatcgattatgtcttttgcgcattcgtcgacaattgcatatattgataaaaataataatagtgggtataattaagttgttaggaggttagttagagtgaaaccagtaacgttatacgatgtcgcagagtatgccggtgtctcttatcagaccgtttcccgcgtggtgaaccaggccagccacgtttctgcgaaaacgcgggaaaaagtggaagcggcgatggcggagctgaattacattcccaaccgcgtggcacaacaactggcgggcaaacagtcgttgctgattggcgttgccacctccagtctggccctgcacgcgccgtcgcaaattgtcgcggcgattaaatctcgcgccgatcaactgggtgccagcgtggtggtgtcgatggtagaacgaagcggcgtcgaagcctgtaaagcggcggtgcacaatcttctcgcgcaacgcgtcagtgggctgatcattaactatccgctggatgaccaggatgccattgctgtggaagctgcctgcactaatgttccggcgttatttcttgatgtctctgaccagacacccatcaacagtattattttctcccatgaagacggtacgcgactgggcgtggagcatctggtcgcattgggtcaccagcaaatcgcgctgttagcgggcccattaagttctgtctcggcgcgtctgcgtctggctggctggcataaatatctcactcgcaatcaaattcagccgatagcggaacgggaaggcgactggagtgccatgtccggttttcaacaaaccatgcaaatgctgaatgagggcatcgttcccactgcgatgctggttgccaacgatcagatggcgctgggcgcaatgcgcgccattaccgagtccgggctgcgcgttggtgcggacatctcggtagtgggatacgacgataccgaagacagctcatgttatatcccgccgttaaccaccatcaaacaggattttcgcctgctggggcaaaccagcgtggaccgcttgctgcaactctctcagggccaggcggtgaagggcaatcagctgttgcccgtctcactggtgaaaagaaaaaccaccctggcgcccaatacgcaaaccgcctctccccgcgcgttggccgattcattaatgcagctggcacgacaggtttcccgactggaaagcgggcagtgagcgcaacgcaattaatgtaagttagctcactcattaggcaccgggatctcgaccgatgcccttgagagccttcaacccagtcagctccttccggtgggcgcggggcatgactagcatgatcgtgctcctgtcgttgaggacccggctaggctggcggggttgccttactggttagcagaatgaatcaccgatacgcgataacttcgtataatgtatgctatacgaacggtagctcagctagcacccggaattgtgagcggataacaattccttggaattgtgagcggataacaattataattaagttgttaggagggaacttagatgtgttctgtaagcacagaaaacgtcagcttcacagaaacagaaacagaagcgagacgcagtgccaattatgaaccaaatagctgggattatgattatcttctgagtagtgataccgatgaaagcattgaagtatataaagataaagccaaaaaattagaagcagaagtgagacgtgaaattaataatgaaaaagctgaatttctgacactgttagaacttattgataatgtgcagcgcctgggattaggctatagatttgaaagcgatattagaggcgcactggatcgttttgtgagttcaggtggatttgatgctgttacaaaaactagccttcatggaactgcgctgagttttcgccttctgagacagcacggctttgaagttagccaagaagcctttagtggttttaaagatcaaaatggaaattttctggaaaatcttaaagaagatattaaagcaatactttcactgtatgaagcaagttttctggcacttgaaggagaaaatatacttgatgaagctaaagtttttgcgatttcacatcttaaagaactgtctgaagaaaaaattggcaaagaactggctgaacaggttaatcatgcgctggaattaccgcttcaccgcagaacccaaagattagaagccgtttggtctattgaagcatatcgtaaaaaagaagatgccaatcaggtacttcttgaattagcaatacttgattataatatgattcagagcgtgtatcaacgtgatcttcgcgaaaccagtagatggtggcgtcgcgttggccttgctacgaaactgcattttgcgagagatcgtctgattgaaagcttttattgggccgtgggtgttgcatttgaaccacaatatagcgattgtcgtaatagtgttgcaaaaatgtttagttttgtaactataattgatgatatttatgatgtttatggtacacttgatgaactggaactttttactgatgctgtagaacgctgggatgtgaatgcgattaatgatctgccagattatatgaaactttgttttcttgccctgtataatacaattaatgaaattgcatatgataatcttaaagataaaggagaaaatatactgccttatttaactaaagcatgggctgatttatgcaatgcttttcttcaggaagcgaaatggctgtataataaatcaacccctacgtttgatgattattttggcaatgcttggaaatctagcagtggtccgttacagcttgtttttgcttattttgcggttgtacaaaatattaaaaaagaagaaattgaaaatctgcaaaaatatcatgatactatttcacgtccttctcacatatttcgcttatgtaatgatcttgcgtcagcaagtgcagaaattgcccgcggtgaaaccgcaaatagcgtaagttgctatatgagaacaaaaggaatttcagaagaacttgcaactgaatctgtgatgaatctgattgatgaaacctggaagaaaatgaataaagaaaaattaggcggttctctgtttgctaaaccatttgtagaaacggctataaatcttgcgcgtcagtcacattgcacctatcacaatggagatgcgcatacgtctccggatgaacttaccagaaaaagagtgctgagtgtgattaccgaaccgatactgccatttgaacgctaattaaggggcgccacaaacgagtgacaggagggaacttagatgcaaacggaacacgtcattttattgaatgcacagggagttcccacgggtacgctggaaaagtatgccgcacacacggcagacaccctcttacatctcgcgttctccagttggctgtttaatgccaaggggcaattattagttacccgccgcgcactgagcaaaaaagcatggcctggcgtgtggactaactcggtttgtgggcacccacaactgggagaaagcaacgaagacgcagtgatccgccgttgccgttatgagcttggcgtggaaattacgcctcctgaatctatctatcctgactttcgctatcgcgccaccgatccgaatggcattgtggaaaatgaagtgtgtccggtatttgccgcacgcaccaacagtgcgttacagatcaacgatgatgaagtgatggattatcaatggtgtgatttagcagatgtattacacggtattgatgccacgccgtgggcgttcagtccgtggatggtaatgcaggcagccaatagtgaagcaagaaaattgttgtctgctttcgcgcagcacaattaaaaaaccccgacatttgccgggctagcaggaggaattaacatggcaaccactcatttggatgtttgcgccgtggttccggcggccggatttggccgtcgaatgcaaacggaatgtcctaagcaatatctctcaatcggtaatcaaaccattcttgaacactcggtgcatgcgctgctggcgcatccccgggtgaaacgtgtcgtcattgccataagtcctggcgatagccgttttgcacaacttcctctggcgaatcatccgcaaatcaccgttgtagatggcggtgatgagcgtgccgattccgtgctgacaggtttgaaagccgctggcgacgcgcagtgggtattggtgcatgacgccgctcgtccttgtttgcatcaggatgacctcgcgcgattgttggcgttgagcgaaaccagccgcacgggggggatcctcgccgcaccagtgcgcgatactatgaaacgtgccgaaccgggcaaaaatgccattgctcataccgttgatcgcaacggcttatggcacgcgctgacgccgcaatttttccctcgtgagctgttacatgactgtctgacgcgcgctctaaatgaaggcgcgactattaccgacgaagcctcggcgctggaatattgcggattccatcctcagttggtcgaaggccgtgcggataacattaaagtcacgcgcccggaagatttggcactggccgagttttacctcacccgaaccatccatcaggagaatacataatgcgaattggacacggttttgacgtacatgcctttggcggtgaaggcccaattatcattggtggcgtacgcattccttacgaaaaaggattgctggcgcattctgatggcgacgtggcgctccatgcgttgaccgatgcattgcttggcgcggcggcgctgggggatatcggcaagctgttcccggataccgatccggcatttaaaggtgccgatagccgcgagctgctacgcgaagcctggcgtcgtattcaggcgaagggttatacccttggcaacgtcgatgtcactatcatcgctcaggcaccgaagatgttgccgcacattccacaaatgcgcgtgtttattgccgaagatctcggctgccatatggatgatgttaacgtgaaagccactactacggaaaaactgggatttaccggacgtggggaagggattgcctgtgaagcggtggcgctactcattaaggcaacaaaatgataagaagaggaggcagtgtatgagttttgatattgccaaatacccgaccctggcactggtcgactccacccaggagttacgactgttgccgaaagagagtttaccgaaactctgcgacgaactgcgccgctatttactcgacagcgtgagccgttccagcgggcacttcgcctccgggctgggcacggtcgaactgaccgtggcgctgcactatgtctacaacaccccgtttgaccaattgatttgggatgtggggcatcaggcttatccgcataaaattttgaccggacgccgcgacaaaatcggcaccatccgtcagaaaggcggtctgcacccgttcccgtggcgcggcgaaagcgaatatgacgtattaagcgtcgggcattcatcaacctccatcagtgccggaattggtattgcggttgctgccgagaaagaaggcaaaaatcgccgcaccgtctgtgtaatcggcgatggtgcgattaccgcaggcatggcgtttgaagcgatgaatcacgcgggcgatatccgtcctgatatgctggtggttctcaacgacaatgaaatgtcgatttccgaaaatgtcggcgcgctcaacaaccatctggcgcagctgctttccggtaagctttactcttcactgcgcgaaggcgggaaaaaagttttctctggcgttccgccaattaaagagctgctcaaacgcaccgaagaacatattaaaggcatggtagtgcctggcacgttgtttgaagagctgggctttaactacatcggcccggttgacggtcacgatgtgctggggcttatcaccacgcttaagaacatgcgcgacctgaaaggcccgcagttcctgcatatcatgaccaaaaaaggtcgtggttatgaaccggcagaaaaagacccaatcactttccacgccgtgcctaaatttgatccctccagcggttgtttgccgaaaagtagcggcggtttgccgagctattcaaaaatctttggcgactggttgtgtgaaacggcagcgaaagacaacaagctgatggcgattactccggcaatgcgtgaaggttccggcatggtcgagttttcacgtaaattcccggatcgctacttcgacgtggcaattgccgagcaacacgcagtgacctttgccgccggtctggcgattggtgggtacaaacccattgtcgcgatttactccactttcctgcaacgcgcctatgatcaggtgctgcatgacgtggcgattcaaaagctaccggtcctgttcgccattgaccgcgcgggcattgttggtgctgacggtcaaactcaccagggcgcttttgatctctcttacctgcgctgcataccagaaatggtcattatgaccccgagcgatgaaaacgaatgtcgccagatgctctataccggctatcactataacgatggcccgtccgcggtgcgctacccgcgcggcaacgcggttggcgtggaactgacgccgctggaaaaactaccaattggcaaaggcattgtgaagcgtcgtggcgagaaactggcgatccttaactttggtacgctgatgccagaagcggcgaaagtcgccgaatcgctgaacgccacgctggtcgatatgcgttttgtgaaaccgcttgatgaagcgttaattctggaaatggccaccagccatgaagcgctggtcaccgtagaagaaaacgccattatgggcggcgcaggtagcggagtgaacgaagtgctgatggcccatcgtaaaccagtacccgtgctgaacattggtctgccggacttctttattccgcaaggaactcaggaagaaatgcgcgccgaactcggcctcgatgccgccggtatggaagccaaaatcaaggcctggctggcataatccctactccactcctgctatgcttaacaaattattcatagactctaaataattcgagttgcaggaaggcggcaaacgagtgaaggaacatgtgagcaataaaaataagaagcctgcatttgcaggcttcttatttttaaggccagcaaaaggccaggaaccgtaaaaaggccgcgttgctggcgtttttccataggctccgcccccctgacgagcatcacaaaaatcgacgctcaagtcagaggtggcgaaacccgacaggactataaagataccaggcgtttccccctggaagctccctcgtgcgctctcctgttccgaccctgccgcttaccggatacctgtccgcctttctcccttcgggaagcgtggcgctttctcatagctcacgctgtaggtatctcagttcggtgtaggtcgttcgctccaagctgggctgtgtgcacgaaccccccgttcagcccgaccgctgcgccttatccggtaactatcgtcttgagtccaacccggtaagacacgacttatcgccactggcagcagccactggtaacaggattagcagagcgaggtatgtaggcggtgctacagagttcttgaagtggtggcctaactacggctacactagaagaacagtatttggtatctgcgctctgctgaagccagttaccttcggaaaaagagttggtagctcttgatccggcaaacaaaccaccgctggtagcggtggtttttttgtttgcaagcagcagattacgcgcagaaaaaaaggatctcaagaagatcctttgatcttttctacggggtctgacgctcagtggaacgaaaactcacgttaagggattttggtcatgagattatcaaaaaggatcttcacctagatccttttaaattaaaaatgaagttttaaatcaatctaaagtatatatgagtaaacttggtctgacagctcttcctttttcaatattattgaagcatttatcagggttattgtctcatgagcggatacatatttgaatgtatttagaaaaataaacaaataggggttccgcgcacatttccccgaaaagtgccacctg

SEQ ID NO: 7 - DNA, 13871 bp, artificial sequence
  plasmid SG156
aaggccagcaaaaggccaggaaccgtaaaaaggccgcgttgctggcgtttttccataggctccgcccccctgacgagcatcacaaaaatcgacgctcaagtcagaggtggcgaaacccgacaggactataaagataccaggcgtttccccctggaagctccctcgtgcgctctcctgttccgaccctgccgcttaccggatacctgtccgcctttctcccttcgggaagcgtggcgctttctcatagctcacgctgtaggtatctcagttcggtgtaggtcgttcgctccaagctgggctgtgtgcacgaaccccccgttcagcccgaccgctgcgccttatccggtaactatcgtcttgagtccaacccggtaagacacgacttatcgccactggcagcagccactggtaacaggattagcagagcgaggtatgtaggcggtgctacagagttcttgaagtggtggcctaactacggctacactagaagaacagtatttggtatctgcgctctgctgaagccagttaccttcggaaaaagagttggtagctcttgatccggcaaacaaaccaccgctggtagcggtggtttttttgtttgcaagcagcagattacgcgcagaaaaaaaggatctcaagaagatcctttgatcttttctacggggtctgacgctcagtggaacgaaaactcacgttaagggattttggtcatgagattatcaaaaaggatcttcacctagatccttttaaattaaaaatgaagttttaaatcaatctaaagtatatatgagtaaacttggtctgacagctcttcctttttcaatattattgaagcatttatcagggttattgtctcatgagcggatacatatttgaatgtatttagaaaaataaacaaataggggttccgcgcacatttccccgaaaagtgccacctgacggtcctgcatcagctcttatatattaagctaccaacttagtatataagccaaaacttaaatgtgctaccaacacatcaagccgttagagaactctatctatagcaatatttcaaatgtaccgacatacaagagaaacattaactatatatattcaatttatgagattatcttaacagatataaatgtaaattgcaataagtaagatttagaagtttatagcctttgtgtattggaagcagtacgcaaaggcttttttatttgataaaaattagaagtatatttattttttcataattaatttatgaaaatgaaagggggtgagcaaagtgacagaggaaagcagtatcttatcaaataacaaggtattagcaatatcattattgactttagcagtaaacattatgacttttatagtgcttgtagctaagtagtacgaaagggggagctttaaaaagctccttggaatacatagaattcataaattaatttatgaaaagaagggcgtatatgaaaacttgtaaaaattgcaaagagtttattaaagatactgaaatatgcaaaatacattcgttgatgattcatgataaaacagtagcaacctattgcagtaaatacaatgagtcaagatgtttacataaagggaaagtccaatgtattaattgttcaaagatgaaccgatatggatggtgtgccataaaaatgagatgttttacagaggaagaacagaaaaaagaacgtacatgcattaaatattatgcaaggagctttaaaaaagctcatgtaaagaagagtaaaaagaaaaaataatttatttattaatttaatattgagagtgccgacacagtatgcactaaaaaatatatctgtggtgtagtgagccgatacaaaaggatagtcactcgcattttcataatacatcttatgttatgattatgtgtcggtgggacttcacgacgaaaacccacaataaaaaaagagttcggggtagggttaagcatagttgaggcaactaaacaatcaagctaggatatgcagtagcagaccgtaaggtcgttgtttaggtgtgttgtaatacatacgctattaagatgtaaaaatacggataccaatgaagggaaaagtataatttttggatgtagtttgtttgttcatctatgggcaaactacgtccaaagccgtttccaaatctgctaaaaagtatatcctttctaaaatcaaagtcaagtatgaaatcataaataaagtttaattttgaagttattatgatattatgtttttctattaaaataaattaagtatatagaatagtttaataatagtatatacttaatgtgataagtgtctgacagtgtcacagaaaggatgattgttatggattataagcggccggccagtgggcaagttgaaaaattcacaaaaatgtggtataatatctttgttcattagagcgataaacttgaatttgagagggaacttagatggtatttgaaaaaattgataaaaatagttggaacagaaaagagtattttgaccactactttgcaagtgtaccttgtacctacagcatgaccgttaaagtggatatcacacaaataaaggaaaagggaatgaaactatatcctgcaatgctttattatattgcaatgattgtaaaccgccattcagagtttaggacggcaatcaatcaagatggtgaattggggatatatgatgagatgataccaagctatacaatatttcacaatgatactgaaacattttccagcctttggactgagtgtaagtctgactttaaatcatttttagcagattatgaaagtgatacgcaacggtatggaaacaatcatagaatggaaggaaagccaaatgctccggaaaacatttttaatgtatctatgataccgtggtcaaccttcgatggctttaatctgaatttgcagaaaggatatgattatttgattcctatttttactatggggaaatattataaagaagataacaaaattatacttcctttggcaattcaagttcatcacgcagtatgtgacggatttcacatttgccgttttgtaaacgaattgcaggaattgataaatagttaacttcaggtttgtctgtaactaaaaacaagtatttaagcaaaaacatcgtagaaatacggtgttttttgttaccctaagtttgttaagggatgcataaactgcatcccttaacttgtttttcgtgtacctattttttgtgaatcgattatgtcttttgcgcattcgtcgacaattgcatatattgataaaaataataatagtgggtataattaagttgttaggaggttagttagagtgaaaccagtaacgttatacgatgtcgcagagtatgccggtgtctcttatcagaccgtttcccgcgtggtgaaccaggccagccacgtttctgcgaaaacgcgggaaaaagtggaagcggcgatggcggagctgaattacattcccaaccgcgtggcacaacaactggcgggcaaacagtcgttgctgattggcgttgccacctccagtctggccctgcacgcgccgtcgcaaattgtcgcggcgattaaatctcgcgccgatcaactgggtgccagcgtggtggtgtcgatggtagaacgaagcggcgtcgaagcctgtaaagcggcggtgcacaatcttctcgcgcaacgcgtcagtgggctgatcattaactatccgctggatgaccaggatgccattgctgtggaagctgcctgcactaatgttccggcgttatttcttgatgtctctgaccagacacccatcaacagtattattttctcccatgaagacggtacgcgactgggcgtggagcatctggtcgcattgggtcaccagcaaatcgcgctgttagcgggcccattaagttctgtctcggcgcgtctgcgtctggctggctggcataaatatctcactcgcaatcaaattcagccgatagcggaacgggaaggcgactggagtgccatgtccggttttcaacaaaccatgcaaatgctgaatgagggcatcgttcccactgcgatgctggttgccaacgatcagatggcgctgggcgcaatgcgcgccattaccgagtccgggctgcgcgttggtgcggacatctcggtagtgggatacgacgataccgaagacagctcatgttatatcccgccgttaaccaccatcaaacaggattttcgcctgctggggcaaaccagcgtggaccgcttgctgcaactctctcagggccaggcggtgaagggcaatcagctgttgcccgtctcactggtgaaaagaaaaaccaccctggcgcccaatacgcaaaccgcctctccccgcgcgttggccgattcattaatgcagctggcacgacaggtttcccgactggaaagcgggcagtgagcgcaacgcaattaatgtaagttagctcactcattaggcaccgggatctcgaccgatgcccttgagagccttcaacccagtcagctccttccggtgggcgcggggcatgactagcatgatcgtgctcctgtcgttgaggacccggctaggctggcggggttgccttactggttagcagaatgaatcaccgatacgcgataacttcgtataatgtatgctatacgaacggtagctcagctagcacccggaattgtgagcggataacaattccttggaattgtgagcggataacaattataattaagttgttaggagggaacttagatgtgtgctactagtagtcagtttactcaaatcactgaacataattcgagaagaagtgctaattaccaacctaatctatggaatttcgagtttcttcaaagtttggaaaatgatttgaaggttgaaaaactagaagagaaagctacaaagttagaagaagaagttaggtgtatgatcaatcgagttgatactcaacctttatccttacttgaattaatagatgatgttcaaagattaggacttacctataagtttgagaaagacataatcaaagcgttagagaacatagtactattagacgaaaacaaaaagaataagtctgatttacatgctacagcactttcgtttagacttctaagacaacatggttttgaagttagtcaagatgtatttgagagatttaaagataaagaaggtggattttcaggagagttaaaaggtgatgttcaaggtttgttaagtctgtatgaagcatcttatttgggatttgaaggagaaaacctgttagaagaagctagaacattttcgataactcatctgaaaaataacctcaaagaaggaatcaacacaaaagttgctgaacaagtttctcatgcattagagttaccttatcatcagagattacatcgattagaagcaagatggtttttggacaaatacgaacctaaagaacctcatcatcagctcttgttagaacttgcaaagttagattttaatatggtccaaacattacaccaaaaggaattacaggatctaagtagatggtggactgaaatgggtttagctagtaaacttgactttgttagagacagattaatggaagtgtatttttgggcattaggaatggctcctgatccacaatttggtgaatgtagaaaagctgtaacgaaaatgttcggattagtaacgattatagatgatgtctatgatgtttacggtactttagatgaattgcaactctttacagatgcagttgaaagatgggatgtaaatgcaatcaatacgttaccagattacatgaagttatgctttttagcgttgtataataccgtcaatgatacttcatattccatacttaaggaaaaaggccacaataatctttcctatttaaccaagtcatggagagaattatgtaaggcatttttacaggaagcaaaatggtctaacaataaaataatcccagcattctctaaatatcttgaaaatgcttccgtatcatcttcaggagttgcattattagcaccatcttattttagcgtttgtcaacaacaagaagatatcagtgatcatgctctaagatccttaactgattttcatggattagtcagaagttcatgtgttatattccgtctttgtaatgatttagctacaagtgcagctgaattagaaagaggtgaaactacgaatagtattatatcctatatgcacgaaaatgatggaacaagtgaagaacaagctagagaagaattacgcaagttaattgatgcagaatggaagaaaatgaatcgtgaaagagtatctgatagcacattattacccaaagcttttatggagattgcagtaaatatggctagagtaagtcattgcacatatcagtatggagatggattaggtagacctgattatgctacagaaaatcgcataaaactcttattaatagatcctttcccaatcaatcagctaatgtatgtttagttaaggggcgccacaaacgagtgacaggaggtagaatatgaagaattgtgtaatcgtgagtgcagttagaactgctataggctcttttaatggaagtttagcatctacaagtgcaatcgatcttggagctactgtcatcaaagctgcaatagaaagggcaaaaatagactcacaacacgttgacgaagtaataatggggaatgttcttcaagctggtttaggacaaaaccctgctagacaagcattactcaaaagtggtctagcagaaacagtttgcggctttacggttaacaaagtttgtggatcagggcttaaatctgtcgctttagcagctcaagcaattcaagcaggtcaagctcagagtatagttgctggtggaatggaaaatatgtctcttgcaccatacttattggatgctaaagctagaagtgggtatagactaggtgatggtcaggtatatgacgttatactaagagatgggttaatgtgtgcaacacatgggtatcatatgggcataactgctgaaaatgtcgctaaggaatatggcataacacgagaaatgcaagatgaactcgcattacactcacagagaaaagcagcagctgctatagaatcaggagcatttactgctgagatagttccagtcaatgtcgttactcgtaaaaagaccttcgtattcagtcaggatgaatttcctaaggcgaatagtacagcagaagctttaggagcattaagaccagcgtttgataaagcaggtacagttacagctggaaatgcatcagggataaatgatggagcagcagcattggtgattatggaagagagtgcagctttagcagcaggtttgactcctttagcaaggattaagagctatgctagtggtggagttccgcctgctttaatgggaatgggacctgttcctgctacacagaaagctctccaactagctggattacaactggcagacattgatctcatcgaagcaaatgaggcatttgctgcacaatttctcgcagtaggtaagaacttaggcttcgattcagagaaagtcaatgtaaatggaggtgcaattgcgttaggtcatccaataggagcttcaggtgcaagaatcctagtaaccttgttacatgctatgcaagctagagataaaacccttggattagcgacgttatgtataggaggtggacaaggaatcgctatggtaattgagagactgaattagaggcgctgaggagatcttactattatgaacatcaaaaaacagggattaggtcaagcaactggcaaaataatactcatgggtgaacatgctgttgtatacggtgaacctgcaatagctttcccttttcaagcgacagaaatcacagcagtattcactcttgctaagacaatgcaaatcgattgtgcatactttaccggtttactagaggatgtaccacaggaattagcgaacataaaggaggtggtacaacaaaccctccattttctgaaagaggacacgtttaagggaaccttaacccttacaagtaccattcctgctgaaagaggaatgggatctagtgcagctacagcagtagcgattgtgagatcattattcgactatttcgactacgcttatacgtatcaggaactctttgaactggttagtctaagtgagaaaatcgcacatggaaatccttcaggaattgatgcagcagctacaagtggtgcagatccgttgtttttcaccagaggttttcctccaactcacttctccatgaatctgtccaatgcttacttagtagtcgctgatactggaattaagggtcaaacgagagaagcagttaaagatatagctcaactcgcacagaataatcccactgcaattgctgagacaatgaagcagttaggttccttcacgaaagaagcgaaacaagctattctccaagatgataagcagaaacttggtcagttgatgactcttgcacaagagcagttacaacagctgagtgtgtctaacgatatgttggacagattagtggcactatcgttggaacatggagcattaggtgcgaagttaacaggtggaggtagaggtggatgtatgattgcgttaaccgataataaaaagaccgctcaaactatagctcagacactagaagagaatggagcagtcgctacttggatacaaagtctcgaagtcaaaaagtagcagaatagtcaggaggaatcaatggagaactacaatgacatactcgaaaagatgttaaatggtgagatcaaaccttatcagttggataagatgtttggaagcaaaattgctactgaaatcaggagaaaatttatagagaagaaagttggcattgaatttaaacatatatgtaactatagcatagatgaagaaatggcaatgaagaaaaatattgagaatatgattggtgcaattcaaatcccattaggttttgctggtccactaaagataaatggagagtatgctaaaggtgagttttatattcccttagctacaactgaaggagcattagtagcttcagttaatagagggtgtagtattatcaccaaatgtggaggagcaacagttagggtaattgatgataagatgacaagagcaccttgtttaaaaaccaaaagtgttgttgatgctatcaaagttagagattggattagagagaacttcgaaagaatcaaggaagttgctgaatctacaacaagacatgggaaactgataaaaatcgaacctatactcatagttggacgaaatttgtatcctaggtttgttttcaaaactggagatgctatgggtatgaatatggtgactatagcaacagaaaaagcgtgtaattttatcgaaggtgaactcaaaaaggaaggaatattcgttaagactgtagcagtatcaggaaatgcatgtgtagataagaaaccaagtggtatgaatcttatcaatggaagaggtaagagtatagttgcagaagtatttctcactgagaaagaagttaacaaatatctcaagactacatcacaagcaatagctgaagtcaatagactaaagaactatataggatctgcaatatccaatagtatgggatttaatgctcactatgcgaatataattggagctatatttttagcgacaggtcaagatgaagctcatatagttgaaggatcattagggattacaatggctgaagtagaagatgacggtttatacttttcggttacattacctgatgttcctataggtacagttggaggaggaactagagtagaaacacagaaagaatgtcttgaaatgcttggatgttatggcgataataaagcgttaaaatttgcggaaatagtaggtgcagcagttttagcaggagagttgtctttattaggagcattagcagcaggacatttaggtaaagctcatcaagaattgggtagatagctcgagtcacggaattgtgagcggataacaattccttggaattgtgagcggataacaattataattaagttgttaggagggaacttagatgacgttaggaattgataaaatcaacttctatgtccccaaatattacgtggatatggcgaaattagcagaggcaagacaagttgatcccaacaagttcctcatcggtattggacagactgaaatggctgtttctcctgtcaatcaggacattgtaagtatgggtgcaaatgcagctaaggacataatcacagatgaggacaaaaagaaaatcggaatggtaatagtcgcaacagaatctgcagtagatgcagctaaagcagcagcagttcaaattcacaatttattagggattcaaccttttgcgagatgtttcgaaatgaaggaagcatgttatgctgcaactccagctatccaattggcaaaggactatctagctacaagacctaacgagaaagttttggtcatagctactgatactgctagatacggacttaactcaggaggtgaacctacacaaggtgcaggtgcagtagcaatggtcatatcccacaatcctagtatactcgcattaaacgaggatgcagttgcatatacggaagatgtgtacgacttttggagacctactggtcataagtaccctctagttgatggagctctttctaaggacgcttatatccgaagttttcaacagtcttggaatgagtatgcgaaaagacaaggcaaatccttagcagatttcgcaagtttatgcttccatgttcccttcactaaaatggggaaaaaagcgttagagtccatcatagataacgctgatgaaaccactcaagagagacttagatccggttatgaagatgctgtggactataaccgctatgttgggaacatttacacgggaagtttgtacctgtcactcatatccttgcttgagaatcgtgacttacaagcaggtgaaacgattggattgttctcgtatggaagtggtagtgtaggggagttttacagtgcgacgttagtagaaggctataaggaccatcttgatcaagctgcacataaagctctccttaataaccgtaccgaagttagtgtagatgcttacgagaccttctttaagaggtttgatgacgttgatttcgacgaacaacaagatgctgtacatgaagatcgtcatatcttctacctgagtaacatcgagaataacgtcagagagtaccatagaccagaatagtcggaattctagaggaggaatcaatgcaaacggaacacgtcattttattgaatgcacagggagttcccacgggtacgctggaaaagtatgccgcacacacggcagacaccctcttacatctcgcgttctccagttggctgtttaatgccaaggggcaattattagttacccgccgcgcactgagcaaaaaagcatggcctggcgtgtggactaactcggtttgtgggcacccacaactgggagaaagcaacgaagacgcagtgatccgccgttgccgttatgagcttggcgtggaaattacgcctcctgaatctatctatcctgactttcgctatcgcgccaccgatccgaatggcattgtggaaaatgaagtgtgtccggtatttgccgcacgcaccaacagtgcgttacagatcaacgatgatgaagtgatggattatcaatggtgtgatttagcagatgtattacacggtattgatgccacgccgtgggcgttcagtccgtggatggtaatgcaggcagccaatagtgaagcaagaaaattgttgtctgctttcgcgcagcacaattaatatatatgtaaggaggattttgatgttaagtggtaaagctagagcacatacgaatatagcactgattaagtactggggtaaagcaaatgaagagtatattttacccatgaactctagtttaagtttaacacttgatgcgttttacactgaaactacagtcatatttgatgcacattactcagaagatgttttcatcttagacggtatacttcagaacgagaaacagactaaaaaggttaaggagtttcttaatttagttcgacaacaagctgattgtacatggtttgcaaaagttgaaagccaaaactttgtacctacagcagctggtttagcatctagtgcatcaggtttagctgcattagcaggagcatgtaatgttgcattaggattgaatttgtccgctaaggatttgtctaggttagctagaagaggtagtggtagtgcatgtagatctatatttggtggattcgctcaatggaacaaaggtcatagtgatgaaaccagttttgcagagaatatacctgcaaataattgggagaatgaattggcaatgttgtttatcttgataaatgatggagaaaaagatgtgagtagtagagatggaatgaaaagaacagtcgaaacaagtagcttttatcaaggatggttagacaatgtcgaaaaggatttgagtcaagttcatgaagctatcaagaccaaagattttccaagattaggggaaataatcgaagcaaatggattacgtatgcatggaactacattaggtgctgtaccaccttttacgtattggtctccaggatcattacaggctatggcattagtcagacaagctagagctaaagggataccatgttatttcacaatggatgctggacctaatgtaaaagttcttgtcgaaaagaaaaacttagaggctcttaaaacctttctaagtgaacacttttccaaggaacaattagttcctgcttttgctggaccaggaatcgaattgtttgaaaccaaagggatggataaatagaggaggtatgtaaaaatgatagaagttacaacaccaggtaaattgtttatagcaggtgaatatgcagtagttgaaccaggtcatcctgcaattatagtagctgttgatcaatttgtcactgttactgttgaagaaacaactgatgaaggttctattcaaagtgctcaatattcgagtctccctataagatggactagaagaaatggtgaacttgtactagacatcagggaaaatccatttcactacgtattagctgcaatacatctaaccgaaaagtatgcacaagaacagaataaggaactctccttttatcaccttaaagttacgagtgaattggattcttcgaatggaagaaagtatggtttaggatcttcaggtgctgtaacagtaggaacagtaaaagcgcttaatatattttatgacttaggacttgagaatgaagagatctttaaactatcagctttagcacatttagcagtacaaggaaatggaagttgtggagatattgctgcaagttgttatggaggatggattgctttcagtacgtttgatcatgattgggtcaatcaaaaggttgcaacagagacgttaaccgatttgttagcaatggattggcctgaactcatgatttttcccttgaaagttcccaaacaacttcgattattaataggatggactggtagtccagcatctacatccgatctagttgatagagtgcatcaaagtaaggaagagaaacaagcagcttatgaacagtttcttatgaaatcgagattatgtgttgagactatgataaacggattcaataccggtaaaattagcgtcatccaaaaacagatcaccaaaaatagacagcttttagcagaacttagtagtttaactggtgttgttatagagacagaagctctcaagaacttatgtgatttagctgagagttatacaggagcagctaaaagtagtggtgctggaggtggagattgtggtattgtcatatttagacagaaaagtggtatactccctttaatgactgcatgggaaaaagatgggattactcctttacctttgcatgtttacacatatggacaaaaggaatgtaaggaaaaacatgagtcaaaaaggtagcccgggaacatgtgagcaaaaggccagaaacgagtgactcgagaacatgtgagcaataaaaataagaagcctgcatttgcaggcttcttattttt

SEQ ID NO: 8 - DNA, 13856 bp, artificial sequence
  plasmid SG157
aaggccagcaaaaggccaggaaccgtaaaaaggccgcgttgctggcgtttttccataggctccgcccccctgacgagcatcacaaaaatcgacgctcaagtcagaggtggcgaaacccgacaggactataaagataccaggcgtttccccctggaagctccctcgtgcgctctcctgttccgaccctgccgcttaccggatacctgtccgcctttctcccttcgggaagcgtggcgctttctcatagctcacgctgtaggtatctcagttcggtgtaggtcgttcgctccaagctgggctgtgtgcacgaaccccccgttcagcccgaccgctgcgccttatccggtaactatcgtcttgagtccaacccggtaagacacgacttatcgccactggcagcagccactggtaacaggattagcagagcgaggtatgtaggcggtgctacagagttcttgaagtggtggcctaactacggctacactagaagaacagtatttggtatctgcgctctgctgaagccagttaccttcggaaaaagagttggtagctcttgatccggcaaacaaaccaccgctggtagcggtggtttttttgtttgcaagcagcagattacgcgcagaaaaaaaggatctcaagaagatcctttgatcttttctacggggtctgacgctcagtggaacgaaaactcacgttaagggattttggtcatgagattatcaaaaaggatcttcacctagatccttttaaattaaaaatgaagttttaaatcaatctaaagtatatatgagtaaacttggtctgacagctcttcctttttcaatattattgaagcatttatcagggttattgtctcatgagcggatacatatttgaatgtatttagaaaaataaacaaataggggttccgcgcacatttccccgaaaagtgccacctgacggtcctgcatcagctcttatatattaagctaccaacttagtatataagccaaaacttaaatgtgctaccaacacatcaagccgttagagaactctatctatagcaatatttcaaatgtaccgacatacaagagaaacattaactatatatattcaatttatgagattatcttaacagatataaatgtaaattgcaataagtaagatttagaagtttatagcctttgtgtattggaagcagtacgcaaaggcttttttatttgataaaaattagaagtatatttattttttcataattaatttatgaaaatgaaagggggtgagcaaagtgacagaggaaagcagtatcttatcaaataacaaggtattagcaatatcattattgactttagcagtaaacattatgacttttatagtgcttgtagctaagtagtacgaaagggggagctttaaaaagctccttggaatacatagaattcataaattaatttatgaaaagaagggcgtatatgaaaacttgtaaaaattgcaaagagtttattaaagatactgaaatatgcaaaatacattcgttgatgattcatgataaaacagtagcaacctattgcagtaaatacaatgagtcaagatgtttacataaagggaaagtccaatgtattaattgttcaaagatgaaccgatatggatggtgtgccataaaaatgagatgttttacagaggaagaacagaaaaaagaacgtacatgcattaaatattatgcaaggagctttaaaaaagctcatgtaaagaagagtaaaaagaaaaaataatttatttattaatttaatattgagagtgccgacacagtatgcactaaaaaatatatctgtggtgtagtgagccgatacaaaaggatagtcactcgcattttcataatacatcttatgttatgattatgtgtcggtgggacttcacgacgaaaacccacaataaaaaaagagttcggggtagggttaagcatagttgaggcaactaaacaatcaagctaggatatgcagtagcagaccgtaaggtcgttgtttaggtgtgttgtaatacatacgctattaagatgtaaaaatacggataccaatgaagggaaaagtataatttttggatgtagtttgtttgttcatctatgggcaaactacgtccaaagccgtttccaaatctgctaaaaagtatatcctttctaaaatcaaagtcaagtatgaaatcataaataaagtttaattttgaagttattatgatattatgtttttctattaaaataaattaagtatatagaatagtttaataatagtatatacttaatgtgataagtgtctgacagtgtcacagaaaggatgattgttatggattataagcggccggccagtgggcaagttgaaaaattcacaaaaatgtggtataatatctttgttcattagagcgataaacttgaatttgagagggaacttagatggtatttgaaaaaattgataaaaatagttggaacagaaaagagtattttgaccactactttgcaagtgtaccttgtacctacagcatgaccgttaaagtggatatcacacaaataaaggaaaagggaatgaaactatatcctgcaatgctttattatattgcaatgattgtaaaccgccattcagagtttaggacggcaatcaatcaagatggtgaattggggatatatgatgagatgataccaagctatacaatatttcacaatgatactgaaacattttccagcctttggactgagtgtaagtctgactttaaatcatttttagcagattatgaaagtgatacgcaacggtatggaaacaatcatagaatggaaggaaagccaaatgctccggaaaacatttttaatgtatctatgataccgtggtcaaccttcgatggctttaatctgaatttgcagaaaggatatgattatttgattcctatttttactatggggaaatattataaagaagataacaaaattatacttcctttggcaattcaagttcatcacgcagtatgtgacggatttcacatttgccgttttgtaaacgaattgcaggaattgataaatagttaacttcaggtttgtctgtaactaaaaacaagtatttaagcaaaaacatcgtagaaatacggtgttttttgttaccctaagtttgttaagggatgcataaactgcatcccttaacttgtttttcgtgtacctattttttgtgaatcgattatgtcttttgcgcattcgtcgacaattgcatatattgataaaaataataatagtgggtataattaagttgttaggaggttagttagagtgaaaccagtaacgttatacgatgtcgcagagtatgccggtgtctcttatcagaccgtttcccgcgtggtgaaccaggccagccacgtttctgcgaaaacgcgggaaaaagtggaagcggcgatggcggagctgaattacattcccaaccgcgtggcacaacaactggcgggcaaacagtcgttgctgattggcgttgccacctccagtctggccctgcacgcgccgtcgcaaattgtcgcggcgattaaatctcgcgccgatcaactgggtgccagcgtggtggtgtcgatggtagaacgaagcggcgtcgaagcctgtaaagcggcggtgcacaatcttctcgcgcaacgcgtcagtgggctgatcattaactatccgctggatgaccaggatgccattgctgtggaagctgcctgcactaatgttccggcgttatttcttgatgtctctgaccagacacccatcaacagtattattttctcccatgaagacggtacgcgactgggcgtggagcatctggtcgcattgggtcaccagcaaatcgcgctgttagcgggcccattaagttctgtctcggcgcgtctgcgtctggctggctggcataaatatctcactcgcaatcaaattcagccgatagcggaacgggaaggcgactggagtgccatgtccggttttcaacaaaccatgcaaatgctgaatgagggcatcgttcccactgcgatgctggttgccaacgatcagatggcgctgggcgcaatgcgcgccattaccgagtccgggctgcgcgttggtgcggacatctcggtagtgggatacgacgataccgaagacagctcatgttatatcccgccgttaaccaccatcaaacaggattttcgcctgctggggcaaaccagcgtggaccgcttgctgcaactctctcagggccaggcggtgaagggcaatcagctgttgcccgtctcactggtgaaaagaaaaaccaccctggcgcccaatacgcaaaccgcctctccccgcgcgttggccgattcattaatgcagctggcacgacaggtttcccgactggaaagcgggcagtgagcgcaacgcaattaatgtaagttagctcactcattaggcaccgggatctcgaccgatgcccttgagagccttcaacccagtcagctccttccggtgggcgcggggcatgactagcatgatcgtgctcctgtcgttgaggacccggctaggctggcggggttgccttactggttagcagaatgaatcaccgatacgcgataacttcgtataatgtatgctatacgaacggtagctcagctagcacccggaattgtgagcggataacaattccttggaattgtgagcggataacaattataattaagttgttaggagggaacttagatgtgttctgtaagcacagaaaacgtcagcttcacagaaacagaaacagaagcgagacgcagtgccaattatgaaccaaatagctgggattatgattatcttctgagtagtgataccgatgaaagcattgaagtatataaagataaagccaaaaaattagaagcagaagtgagacgtgaaattaataatgaaaaagctgaatttctgacactgttagaacttattgataatgtgcagcgcctgggattaggctatagatttgaaagcgatattagaggcgcactggatcgttttgtgagttcaggtggatttgatgctgttacaaaaactagccttcatggaactgcgctgagttttcgccttctgagacagcacggctttgaagttagccaagaagcctttagtggttttaaagatcaaaatggaaattttctggaaaatcttaaagaagatattaaagcaatactttcactgtatgaagcaagttttctggcacttgaaggagaaaatatacttgatgaagctaaagtttttgcgatttcacatcttaaagaactgtctgaagaaaaaattggcaaagaactggctgaacaggttaatcatgcgctggaattaccgcttcaccgcagaacccaaagattagaagccgtttggtctattgaagcatatcgtaaaaaagaagatgccaatcaggtacttcttgaattagcaatacttgattataatatgattcagagcgtgtatcaacgtgatcttcgcgaaaccagtagatggtggcgtcgcgttggccttgctacgaaactgcattttgcgagagatcgtctgattgaaagcttttattgggccgtgggtgttgcatttgaaccacaatatagcgattgtcgtaatagtgttgcaaaaatgtttagttttgtaactataattgatgatatttatgatgtttatggtacacttgatgaactggaactttttactgatgctgtagaacgctgggatgtgaatgcgattaatgatctgccagattatatgaaactttgttttcttgccctgtataatacaattaatgaaattgcatatgataatcttaaagataaaggagaaaatatactgccttatttaactaaagcatgggctgatttatgcaatgcttttcttcaggaagcgaaatggctgtataataaatcaacccctacgtttgatgattattttggcaatgcttggaaatctagcagtggtccgttacagcttgtttttgcttattttgcggttgtacaaaatattaaaaaagaagaaattgaaaatctgcaaaaatatcatgatactatttcacgtccttctcacatatttcgcttatgtaatgatcttgcgtcagcaagtgcagaaattgcccgcggtgaaaccgcaaatagcgtaagttgctatatgagaacaaaaggaatttcagaagaacttgcaactgaatctgtgatgaatctgattgatgaaacctggaagaaaatgaataaagaaaaattaggcggttctctgtttgctaaaccatttgtagaaacggctataaatcttgcgcgtcagtcacattgcacctatcacaatggagatgcgcatacgtctccggatgaacttaccagaaaaagagtgctgagtgtgattaccgaaccgatactgccatttgaacgctaattaaggggcgccacaaacgagtgacaggaggtagaatatgaagaattgtgtaatcgtgagtgcagttagaactgctataggctcttttaatggaagtttagcatctacaagtgcaatcgatcttggagctactgtcatcaaagctgcaatagaaagggcaaaaatagactcacaacacgttgacgaagtaataatggggaatgttcttcaagctggtttaggacaaaaccctgctagacaagcattactcaaaagtggtctagcagaaacagtttgcggctttacggttaacaaagtttgtggatcagggcttaaatctgtcgctttagcagctcaagcaattcaagcaggtcaagctcagagtatagttgctggtggaatggaaaatatgtctcttgcaccatacttattggatgctaaagctagaagtgggtatagactaggtgatggtcaggtatatgacgttatactaagagatgggttaatgtgtgcaacacatgggtatcatatgggcataactgctgaaaatgtcgctaaggaatatggcataacacgagaaatgcaagatgaactcgcattacactcacagagaaaagcagcagctgctatagaatcaggagcatttactgctgagatagttccagtcaatgtcgttactcgtaaaaagaccttcgtattcagtcaggatgaatttcctaaggcgaatagtacagcagaagctttaggagcattaagaccagcgtttgataaagcaggtacagttacagctggaaatgcatcagggataaatgatggagcagcagcattggtgattatggaagagagtgcagctttagcagcaggtttgactcctttagcaaggattaagagctatgctagtggtggagttccgcctgctttaatgggaatgggacctgttcctgctacacagaaagctctccaactagctggattacaactggcagacattgatctcatcgaagcaaatgaggcatttgctgcacaatttctcgcagtaggtaagaacttaggcttcgattcagagaaagtcaatgtaaatggaggtgcaattgcgttaggtcatccaataggagcttcaggtgcaagaatcctagtaaccttgttacatgctatgcaagctagagataaaacccttggattagcgacgttatgtataggaggtggacaaggaatcgctatggtaattgagagactgaattagaggcgctgaggagatcttactattatgaacatcaaaaaacagggattaggtcaagcaactggcaaaataatactcatgggtgaacatgctgttgtatacggtgaacctgcaatagctttcccttttcaagcgacagaaatcacagcagtattcactcttgctaagacaatgcaaatcgattgtgcatactttaccggtttactagaggatgtaccacaggaattagcgaacataaaggaggtggtacaacaaaccctccattttctgaaagaggacacgtttaagggaaccttaacccttacaagtaccattcctgctgaaagaggaatgggatctagtgcagctacagcagtagcgattgtgagatcattattcgactatttcgactacgcttatacgtatcaggaactctttgaactggttagtctaagtgagaaaatcgcacatggaaatccttcaggaattgatgcagcagctacaagtggtgcagatccgttgtttttcaccagaggttttcctccaactcacttctccatgaatctgtccaatgcttacttagtagtcgctgatactggaattaagggtcaaacgagagaagcagttaaagatatagctcaactcgcacagaataatcccactgcaattgctgagacaatgaagcagttaggttccttcacgaaagaagcgaaacaagctattctccaagatgataagcagaaacttggtcagttgatgactcttgcacaagagcagttacaacagctgagtgtgtctaacgatatgttggacagattagtggcactatcgttggaacatggagcattaggtgcgaagttaacaggtggaggtagaggtggatgtatgattgcgttaaccgataataaaaagaccgctcaaactatagctcagacactagaagagaatggagcagtcgctacttggatacaaagtctcgaagtcaaaaagtagcagaatagtcaggaggaatcaatggagaactacaatgacatactcgaaaagatgttaaatggtgagatcaaaccttatcagttggataagatgtttggaagcaaaattgctactgaaatcaggagaaaatttatagagaagaaagttggcattgaatttaaacatatatgtaactatagcatagatgaagaaatggcaatgaagaaaaatattgagaatatgattggtgcaattcaaatcccattaggttttgctggtccactaaagataaatggagagtatgctaaaggtgagttttatattcccttagctacaactgaaggagcattagtagcttcagttaatagagggtgtagtattatcaccaaatgtggaggagcaacagttagggtaattgatgataagatgacaagagcaccttgtttaaaaaccaaaagtgttgttgatgctatcaaagttagagattggattagagagaacttcgaaagaatcaaggaagttgctgaatctacaacaagacatgggaaactgataaaaatcgaacctatactcatagttggacgaaatttgtatcctaggtttgttttcaaaactggagatgctatgggtatgaatatggtgactatagcaacagaaaaagcgtgtaattttatcgaaggtgaactcaaaaaggaaggaatattcgttaagactgtagcagtatcaggaaatgcatgtgtagataagaaaccaagtggtatgaatcttatcaatggaagaggtaagagtatagttgcagaagtatttctcactgagaaagaagttaacaaatatctcaagactacatcacaagcaatagctgaagtcaatagactaaagaactatataggatctgcaatatccaatagtatgggatttaatgctcactatgcgaatataattggagctatatttttagcgacaggtcaagatgaagctcatatagttgaaggatcattagggattacaatggctgaagtagaagatgacggtttatacttttcggttacattacctgatgttcctataggtacagttggaggaggaactagagtagaaacacagaaagaatgtcttgaaatgcttggatgttatggcgataataaagcgttaaaatttgcggaaatagtaggtgcagcagttttagcaggagagttgtctttattaggagcattagcagcaggacatttaggtaaagctcatcaagaattgggtagatagctcgagtcacggaattgtgagcggataacaattccttggaattgtgagcggataacaattataattaagttgttaggagggaacttagatgacgttaggaattgataaaatcaacttctatgtccccaaatattacgtggatatggcgaaattagcagaggcaagacaagttgatcccaacaagttcctcatcggtattggacagactgaaatggctgtttctcctgtcaatcaggacattgtaagtatgggtgcaaatgcagctaaggacataatcacagatgaggacaaaaagaaaatcggaatggtaatagtcgcaacagaatctgcagtagatgcagctaaagcagcagcagttcaaattcacaatttattagggattcaaccttttgcgagatgtttcgaaatgaaggaagcatgttatgctgcaactccagctatccaattggcaaaggactatctagctacaagacctaacgagaaagttttggtcatagctactgatactgctagatacggacttaactcaggaggtgaacctacacaaggtgcaggtgcagtagcaatggtcatatcccacaatcctagtatactcgcattaaacgaggatgcagttgcatatacggaagatgtgtacgacttttggagacctactggtcataagtaccctctagttgatggagctctttctaaggacgcttatatccgaagttttcaacagtcttggaatgagtatgcgaaaagacaaggcaaatccttagcagatttcgcaagtttatgcttccatgttcccttcactaaaatggggaaaaaagcgttagagtccatcatagataacgctgatgaaaccactcaagagagacttagatccggttatgaagatgctgtggactataaccgctatgttgggaacatttacacgggaagtttgtacctgtcactcatatccttgcttgagaatcgtgacttacaagcaggtgaaacgattggattgttctcgtatggaagtggtagtgtaggggagttttacagtgcgacgttagtagaaggctataaggaccatcttgatcaagctgcacataaagctctccttaataaccgtaccgaagttagtgtagatgcttacgagaccttctttaagaggtttgatgacgttgatttcgacgaacaacaagatgctgtacatgaagatcgtcatatcttctacctgagtaacatcgagaataacgtcagagagtaccatagaccagaatagtcggaattctagaggaggaatcaatgcaaacggaacacgtcattttattgaatgcacagggagttcccacgggtacgctggaaaagtatgccgcacacacggcagacaccctcttacatctcgcgttctccagttggctgtttaatgccaaggggcaattattagttacccgccgcgcactgagcaaaaaagcatggcctggcgtgtggactaactcggtttgtgggcacccacaactgggagaaagcaacgaagacgcagtgatccgccgttgccgttatgagcttggcgtggaaattacgcctcctgaatctatctatcctgactttcgctatcgcgccaccgatccgaatggcattgtggaaaatgaagtgtgtccggtatttgccgcacgcaccaacagtgcgttacagatcaacgatgatgaagtgatggattatcaatggtgtgatttagcagatgtattacacggtattgatgccacgccgtgggcgttcagtccgtggatggtaatgcaggcagccaatagtgaagcaagaaaattgttgtctgctttcgcgcagcacaattaatatatatgtaaggaggattttgatgttaagtggtaaagctagagcacatacgaatatagcactgattaagtactggggtaaagcaaatgaagagtatattttacccatgaactctagtttaagtttaacacttgatgcgttttacactgaaactacagtcatatttgatgcacattactcagaagatgttttcatcttagacggtatacttcagaacgagaaacagactaaaaaggttaaggagtttcttaatttagttcgacaacaagctgattgtacatggtttgcaaaagttgaaagccaaaactttgtacctacagcagctggtttagcatctagtgcatcaggtttagctgcattagcaggagcatgtaatgttgcattaggattgaatttgtccgctaaggatttgtctaggttagctagaagaggtagtggtagtgcatgtagatctatatttggtggattcgctcaatggaacaaaggtcatagtgatgaaaccagttttgcagagaatatacctgcaaataattgggagaatgaattggcaatgttgtttatcttgataaatgatggagaaaaagatgtgagtagtagagatggaatgaaaagaacagtcgaaacaagtagcttttatcaaggatggttagacaatgtcgaaaaggatttgagtcaagttcatgaagctatcaagaccaaagattttccaagattaggggaaataatcgaagcaaatggattacgtatgcatggaactacattaggtgctgtaccaccttttacgtattggtctccaggatcattacaggctatggcattagtcagacaagctagagctaaagggataccatgttatttcacaatggatgctggacctaatgtaaaagttcttgtcgaaaagaaaaacttagaggctcttaaaacctttctaagtgaacacttttccaaggaacaattagttcctgcttttgctggaccaggaatcgaattgtttgaaaccaaagggatggataaatagaggaggtatgtaaaaatgatagaagttacaacaccaggtaaattgtttatagcaggtgaatatgcagtagttgaaccaggtcatcctgcaattatagtagctgttgatcaatttgtcactgttactgttgaagaaacaactgatgaaggttctattcaaagtgctcaatattcgagtctccctataagatggactagaagaaatggtgaacttgtactagacatcagggaaaatccatttcactacgtattagctgcaatacatctaaccgaaaagtatgcacaagaacagaataaggaactctccttttatcaccttaaagttacgagtgaattggattcttcgaatggaagaaagtatggtttaggatcttcaggtgctgtaacagtaggaacagtaaaagcgcttaatatattttatgacttaggacttgagaatgaagagatctttaaactatcagctttagcacatttagcagtacaaggaaatggaagttgtggagatattgctgcaagttgttatggaggatggattgctttcagtacgtttgatcatgattgggtcaatcaaaaggttgcaacagagacgttaaccgatttgttagcaatggattggcctgaactcatgatttttcccttgaaagttcccaaacaacttcgattattaataggatggactggtagtccagcatctacatccgatctagttgatagagtgcatcaaagtaaggaagagaaacaagcagcttatgaacagtttcttatgaaatcgagattatgtgttgagactatgataaacggattcaataccggtaaaattagcgtcatccaaaaacagatcaccaaaaatagacagcttttagcagaacttagtagtttaactggtgttgttatagagacagaagctctcaagaacttatgtgatttagctgagagttatacaggagcagctaaaagtagtggtgctggaggtggagattgtggtattgtcatatttagacagaaaagtggtatactccctttaatgactgcatgggaaaaagatgggattactcctttacctttgcatgtttacacatatggacaaaaggaatgtaaggaaaaacatgagtcaaaaaggtagcccgggaacatgtgagcaaaaggccagaaacgagtgactcgagaacatgtgagcaataaaaataagaagcctgcatttgcaggcttcttattttt

SEQ ID NO: 9 - DNA, 6630 bp, artificial sequence
  plasmid pANT
gaattccggatgagcattcatcaggcgggcaagaatgtgaataaaggccggataaaacttgtgcttatttttctttacggtctttaaaaaggccgtaatatccagctgaacggtctggttataggtacattgagcaactgactgaaatgcctcaaaatgttctttacgatgccattgggatatatcaacggtggtatatccagtgatttttttctccattttagcttccttagctcctgaaaatctcgataactcaaaaaatacgcccggtagtgatcttatttcattatggtgaaagttggaacctcttacgtgccgatcaacgtctcattttcgccaaaagttggcccagggcttcccggtatcaacagggacaccaggatttatttattctgcgaagtgatcttccgtcacaggtatttattcggcgcaaagtgcgtcgggtgatgctgccaacttactgatttagtgtatgatggtgtttttgaggtgctccagtggcttctgtttctatcagctgtccctcctgttcagctactgacggggtggtgcgtaacggcaaaagcaccgccggacatcagcgctagcggagtgtatactggcttactatgttggcactgatgagggtgtcagtgaagtgcttcatgtggcaggagaaaaaaggctgcaccggtgcgtcagcagaatatgtgatacaggatatattccgcttcctcgctcactgactcgctacgctcggtcgttcgactgcggcgagcggaaatggcttacgaacggggcggagatttcctggaagatgccaggaagatacttaacagggaagtgagagggccgcggcaaagccgtttttccataggctccgcccccctgacaagcatcacgaaatctgacgctcaaatcagtggtggcgaaacccgacaggactataaagataccaggcgtttccccctggcggctccctcgtgcgctctcctgttcctgcctttcggtttaccggtgtcattccgctgttatggccgcgtttgtctcattccacgcctgacactcagttccgggtaggcagttcgctccaagctggactgtatgcacgaaccccccgttcagtccgaccgctgcgccttatccggtaactatcgtcttgagtccaacccggaaagacatgcaaaagcaccactggcagcagccactggtaattgatttagaggagttagtcttgaagtcatgcgccggttaaggctaaactgaaaggacaagttttggtgactgcgctcctccaagccagttacctcggttcaaagagttggtagctcagagaaccttcgaaaaaccgccctgcaaggcggttttttcgttttcagagcaagagattacgcgcagaccaaaacgatctcaagaagatcatcttattaatcagataaaatatttctagatttcagtgcaatttatctcttcaaatgtagcacctgaagtcagccccatacgatataagttgtaattctcatgtttgacagcttatcatcgataagctttcgtatttgaaaacgtaaaagggttgataacgaagcgtcaccgtcctacattcgacgcacttatcgagaagtttaatgaaataggttacgagattagttgggaagtagtaaacgcgtgggattacggagtagcgcagaaacgtgagcgagtgtttatagttggtgtgcggaatgacctcggttttaagttcgattttccgaatccgttagaaggcgattatcagacgcgagtattgcgggatgtgatcggagatctgccagaggtcggagaatacttctacgttaatcgggggggttggggtaagtgtttggtgaaaagtgttttcggactcgaagatgtatcgccgactataaaaagtcaaaacgcaaatcttcctcctggttatcccggacaccctaaagacgccgatcaaatctgcaaccgaccgattagccaacaaaagcgccccgccgtttcaccgttcgcgaatgtctccgaatccaatctgcgccagacacttacgtcctgccagacgatatttccttaacggcgcagtatcggattagtcggtaacggaattgcttcgcgtgttgcgtggtatatcgggcgggcgttgcggatcaactttcatctaactgtaagtaattatgatagataagatggttgaaatattacataaaagatcaattttatttagagtaaaaataaaatatatggaggttgtttgttgagtaaactacgtgtaatgagcctttttagtggaattggtgcatttgaagctgcattaagaaacataggcgttgattatgaactgattggctttagtgaaatagataaatatgcaatcaaatcttattgtgcaattcataatgtaagtgaaacattgaatgttggagacataagtaaagctaagaaagataatattccatattttgatttgttaacaagtggatttccttgtcccactttttcagtagccggcggccgtgatggtatggaatataagtgtagcaattgttcgcacgagcatttaattacttatgaggattataagaagggagtcaaatgcccgaagtgtgaagctgtttctaaggctaaagatgaacggggaacgctcttttttgaaacagctttgttagcagaagagaagaagccgaaatttgtgatattagaaaatgtaaaagggctaattaatagtggcaatggacaagtgttaagaataattagtgagactatgaacaatataggctataggattgacctagagctacttaattcaaagtttttcaatgttccacagaatcgtgaacgggtatacataattggcattagagaagatttggttgaaaatgaacaatgggttgtaggtcagaagcgaaacgatgttctgagtaaaggtaaaaagagattgcaagaaataaatataaagagttttaattttaaatggcctttacaagacactgtcacaaagaggttgagagaaattcttgaggattttgttgatgagaagtattacttaaatgaagaaaagacgaagaaacttgttgagcaactaggaaccgcaccgctacaaaaacaagaagtaagggagccgttaatggtgggacacgtggatttaaaaggtcacgatgccatcaaaagagtttactcgcctgaaggactttcaccgacattaactacaatgggcggcggtcacagagaacctaaaatcgcagaaaagcagaaagaagtaagggcagtgttaacgccagaaagagaagagaaaagacagaatggaagacgttttaaagaaaacggagaaccggctttcacggttaatacaattgatcgacatggtgtagcaatcggagaatacccaaaatataaaattagaaagctctctccattagaatgttggagactccaagcatttgatgacgaagattttgaaagagcttttgcagcaggaataagtaactcacaattatacaagcaagccggtaattcaattacagttagtgtgcttgagtctatatttcaagaattaatacatacatatgttaataaagaatctgaataaaatttgtcttttaaacaaatgcaaaataagagggattgagaggtgaggaagatggatagttacccagagtctttaaaaagagagacagaggagattaaagagcgtgttaggaatggaaatatcaaagaagacaggattaaagaaattgcagaaacgacagttgagtttttgaaatcagaggagaaaagacataaatacttttctgaagttgctgcagctatggcgtataacttaagtgagtttttcaaatcttatttaaaaggagagtgaatatgctaactgatcagaaaaaattgacttggtaaacgctcttagaagctttaatgcggtagtttatcacagttgacacgtcatgatctatcagctttaatgttgctaacgcagtcaggcaccgtgtatgaaatctaacaatgcgctcatcgtcatcctcggcaccgtcaccctggatgctgtaggcataggcttggttatgccggtactgccgggcctcttgcgggatatcgtccattccgacagcatcgccagtcactatggcgtgctgctagcgctatatgcgttgatgcaatttctatgcgcacccgttctcggagcactgtccgaccgctttggccgccgcccagtcctgctcgcttcgctacttggagccactatcgactacgcgatcatggcgaccacacccgtcctgtggatcctctacgccggacgcatcgtggccggcatcaccggcgccacaggtgcggttgctggcgcctatatcgccgacatcaccgatggggaagatcgggctcgccacttcgggctcatgagcgcttgtttcggcgtgggtatggtggcaggccccgtggccgggggactgttgggcgccatctccttgcatgcaccattccttgcggcggcggtgctcaacggcctcaacctactactgggctgcttcctaatgcaggagtcgcataagggagagcgtcgaccgatgcccttgagagccttcaacccagtcagctccttccggtgggcgcggggcatgactatcgtcgccgcacttatgactgtcttctttatcatgcaactcgtaggacaggtgccggcagcgctctgggtcattttcggcgaggaccgctttcgctggagcgcgacgatgatcggcctgtcgcttgcggtattcggaatcttgcacgccctcgctcaagccttcgtcactggtcccgccaccaaacgtttcggcgagaagcaggccattatcgccggcatggcggccgacgcgctgggctacgtcttgctggcgttcgcgacgcgaggctggatggccttccccattatgattcttctcgcttccggcggcatcgggatgcccgcgttgcaggccatgctgtccaggcaggtagatgacgaccatcagggacagcttcaaggatcgctcgcggctcttaccagcctaacttcgatcactggaccgctgatcgtcacggcgatttatgccgcctcggcgagcacatggaacgggttggcatggattgtaggcgccgccctataccttgtctgcctccccgcgttgcgtcgcggtgcatggagccgggccacctcgacctgaatggaagccggcggcacctcgctaacggattcaccactccaagaattggagccaatcaattcttgcggagaactgtgaatgcgcaaaccaacccttggcagaacatatccatcgcgtccgccatctccagcagccgcacgcggcgcatctcgggcagcgttgggtcctggccacgggtgcgcatgatcgtgctcctgtcgttgaggacccggctaggctggcggggttgccttactggttagcagaatgaatcaccgatacgcgagcgaacgtgaagcgactgctgctgcaaaacgtctgcgacctgagcaacaacatgaatggtcttcggtttccgtgtttcgtaaagtctggaaacgcggaagtcccctacgtgctgctgaagttgcccgcaacagagagtggaaccaaccggtgataccacgatactatgactgagagtcaacgccatgagcggcctcatttcttattctgagttacaacagtccgcaccgctgtccggtagctccttccggtgggcgcggggcatgactatcgtcgccgcacttatgactgtcttctttatcatgcaactcgtaggacaggtgccggcagcgcccaacagtcccccggccacggggcctgccaccatacccacgccgaaacaagcgccctgcaccattatgttccggatctgcatcgcaggatgctgctggctaccctgtggaacacctacatctgtattaacgaagcgctaaccgtttttatcaggctctgggaggcagaataaatgatcatatcgtcaattattacctccacggggagagcctgagcaaactggcctcaggcatttgagaagcacacggtcacactgcttccggtagtcaataaaccggtaaaccagcaatagacataagcggctatttaacgaccctgccctgaaccgacgaccgggtcgaatttgctttcgaatttctgccattcatccgcttattatcacttattcaggcgtagcaccaggcgtttaagggcaccaataactgccttaaaaaaattacgccccgccctgccactcatcgcagtactgttgtaattcattaagcattctgccgacatggaagccatcacagacggcatgatgaacctgaatcgccagcggcatcagcaccttgtcgccttgcgtataatatttgcccatggtgaaaacgggggcgaagaagttgtccatattggccacgtttaaatcaaaactggtgaaactcacccagggattggctgagacgaaaaacatattctcaataaaccctttagggaaataggccaggttttcaccgtaacacgccacatcttgcgaatatatgtgtagaaactgccggaaatcgtcgtggtattcactccagagcgatgaaaacgtttcagtttgctcatggaaaacggtgtaacaagggtgaacactatcccatatcaccagctcaccgtctttcattgccatacg

SEQ ID NO: 10 - DNA, 8617 bp, artificial sequence
  plasmid BG132
acggtcctgcaggtaatacgactcactatagggataacttaaatttatattttttactttataatatataattgattatagaatccaaattagataggaggaccaggtaaatggagaataattttattgtcaacgaaaacgagaaaagggttttaaagcagatatttaacaactccaatatcagtagaactcaaatttccaagaatttagaactgaataaagcaacaatttcgaacattcttaacaatctaaagcataaaagtttggtaaatgaagttggtgaaggaaattctactaaaagtggtggaagaaaacctatacttctcgaaattaatcaaaagtatgggtattatataagcatggatttgacatatgattctgttgagttaatgtataactattttgatgctacaattctcaaacaagatagttatgaactgaatgataagaatgtaagtagcatattacagatactcaaatctaacataaatgttagcgaaaaatacgacacattatacggtttattagggataagtatatccatacatgggattgtagatgatgaacaaaacatcattaatctaccatttcacaagaatgaaaaaagaacgtttactgatgaacttaagtctttcactaatgtaccagtggttattgaaaatgaggcaaatttaagtgcattatacgagaaaagtttatacatcaattcgaatattaacaacttgatcacattgtctatacataaaggtataggagctggcatcataatcaataagaaactctatagaggtagtaatggagaagctggagaaataggaaagactcttgttttagagtctatcaataacaatgataacaagtactataaaatagaggatatttgtagtcaagacgctttgatacaaaagattaataacagattaggagttacacttacatttaccgaactaatacagtattataacgaaggaaatagtattgtagctcatgaaatcaaacagtttatcaacaaaatgactgtcttaatacacaatcttaatactcagtttaatccagatgcaatatacatcaattgtcccttgattaatgaacttcctaatattctaaacgaaatcaaagaacaattctcttgtttttcacaaggaagtcctatacaattgcatttaaccactaatgttaaacaagctacattattaggtggaacattagcaattatgcagaaaacccttaacataaacaatatccaaatgaatattaaatagttacagcagtctgagttataaaatagatatctcggaccgtctattcttccttatttgagtgggtaccaatgaaatctttcgagctaaatcgatttctggcccactcttttttattttttagtaagcgtttacaaaaaatgaacaatgtgctatattacctctaaagttagtttgtttattaaattaaccaactaaaatgtcgggatccaggaggctgagctgatggaaaaaaaggaatttcgtgttttgataaaatactgttttctgaagggaaaaaatacggtggaagcaaaaacttggcttgataatgagtttccggactctgccccagggaaatcaacaataattgattggtatgcaaaattcaagcgtggtgaaatgagcacggaggacggtgaacgcagtggacgcccgaaagaggtggttaccgacgaaaacatcaaaaaaatccacaaaatgattttgaatgaccgtaaaatgaagttgatcgagatagcagaggccttaaagatatcaaaggaacgtgttggtcatatcattcatcaatatttggatatgcggaagctctgtgcaaaatgggtgccgcgcgagctcacatttgaccaaaaacaacaacgtgttgatgattctgagcggtgtttgcagctgttaactcgtaatacacccgagtttttccgtcgatatgtgacaatggatgaaacatggctccatcactacactcctgagtccaatcgacagtcggctgagtggacagcgaccggtgaaccgtctccgaagcgtggaaagactcaaaagtccgctggcaaagtaatggcctctgttttttgggatgcgcatggaataatttttatcgattatcttgagaagggaaaaaccatcaacagtgactattatatggcgttattggagcgtttgaaggtcgaaatcgcggcaaaacggccccacatgaagaagaaaaaagtgttgttccaccaagacaacgcaccgtgccacaagtcattgagaacgatggcaaaaattcatgaattgggcttcgaattgcttccccacccaccgtattctccagatctggcccccagcgactttttcttgttctcagacctcaaaaggatgctcgcagggaaaaaatttggctgcaatgaagaggtgatcgccgaaactgaggcctattttgaggcaaaaccgaaggagtactaccaaaatggtatcaaaaaattggaaggtcgttataatcgttgtatcgctcttgaagggaactatgttgaataagaattccttaattaaggagctcgataaaaataagaagcctgcatttgcaggcttcttatttttatggtcatagctgtttcctggcgcgccgcattcacttcttttctatataaatatgagcgaagcgaataagcgtcggaaaagcagcaaaaagtttcctttttgctgttggagcatgggggttcagggggtgcagtatctgacgtcaatgccgagcgaaagcgagccgaagggtagcatttacgttagataaccccctgatatgctccgacgctttatatagaaaagaagattcaactaggtaaaatcttaatataggttgagatgataaggtttataaggaatttgtttgttctaatttttcactcattttgttctaatttcttttaacaaatgttcttttttttttagaacagttatgatatagttagaatagtttaaaataaggagtgagaaaaagatgaaagaaagatatggaacagtctataaaggctctcagaggctcatagacgaagaaagtggagaagtcatagaggtagacaagttataccgtaaacaaacgtctggtaacttcgtaaaggcatatatagtgcaattaataagtatgttagatatgattggcggaaaaaaacttaaaatcgttaactatatcctagataatgtccacttaagtaacaatacaatgatagctacaacaagagaaatagcaaaagctacaggaacaagtctacaaacagtaataacaacacttaaaatcttagaagaaggaaatattataaaaagaaaaactggagtattaatgttaaaccctgaactactaatgagaggcgacgaccaaaaacaaaaatacctcttactcgaatttgggaactttgagcaagaggcaaatgaaatagattgacctcccaataacaccacgtagttattgggaggtcaatctatgaaatgcgattaagggccggccagtgggcaagttgaaaaattcacaaaaatgtggtataatatctttgttcattagagcgataaacttgaatttgagagggaacttagatggtatttgaaaaaattgataaaaatagttggaacagaaaagagtattttgaccactactttgcaagtgtaccttgtacctacagcatgaccgttaaagtggatatcacacaaataaaggaaaagggaatgaaactatatcctgcaatgctttattatattgcaatgattgtaaaccgccattcagagtttaggacggcaatcaatcaagatggtgaattggggatatatgatgagatgataccaagctatacaatatttcacaatgatactgaaacattttccagcctttggactgagtgtaagtctgactttaaatcatttttagcagattatgaaagtgatacgcaacggtatggaaacaatcatagaatggaaggaaagccaaatgctccggaaaacatttttaatgtatctatgataccgtggtcaaccttcgatggctttaatctgaatttgcagaaaggatatgattatttgattcctatttttactatggggaaatattataaagaagataacaaaattatacttcctttggcaattcaagttcatcacgcagtatgtgacggatttcacatttgccgttttgtaaacgaattgcaggaattgataaatagttaacttcaggtttgtctgtaactaaaaacaagtatttaagcaaaaacatcgtagaaatacggtgttttttgttaccctaagtttacaggttggctgataagtccccggtctgaagttcctattctctagaaagtataggaacttcttccgacgcttattcgcttcgctcatatttatatagaaaagaagtgaatgcgcaaaagacataatcgattcacaaaaaataggtacacgaaaaacaagttaagggatgcagtttatgcatcccttaacttacttattaaataatttatagctattgaaaagagataagaattgttcaaagctaatattgtttaaatcgtcaattcctgcatgttttaaggaattgttaaattgattttttgtaaatattttcttgtattctttgttaacccatttcataacgaaataattatacttctgtttatctttgtgtgatattcttgatttttttctatttaatctgataagtgagctattcactttaggtttaggatgaaaatattctcttggaaccatacttaatatagaaatatcaacttctgccattaaaaataatgccaatgagcgttttgtatttaataatcttttagcaaacccgtattccacgattaaataaatctcatcagctatactatcaaaaacaattttgcgtattatatccgtacttatgttataaggtatattaccaaatattttataggattggtttttaggaaatttaaactgcaatatatccttgtttaaaacttggaaattatcgtgatcaacaagtttattttctgtagttttgcataatttatggtctatttcaatggcagttacgaaattacacctctgtactaattcaagggtaaaatgcccttttcctgagccgatttcaaagatattatcatgttcatttaatcttatatttgtcattattttatctatattatgttttgaagtaataaagttttgactgtgttttatatttttctcgttcattataaccctctttattttttcctccttataaaattagtataattatagcacgagctctgataaatatgaacatgatgagtgatcgttaaatttatactgcaatctgatgcgattattgaagttcctattctctagaaagtataggaacttcacggcagtgaagtttaaacgcatttaagcgtcagagcatggctttatgccgagaaaactattggttggaatggcgtgtgtgttagccaaagctcctgcaggtcgactttttaacaaaatatattgataaaaataataatagtgggtataattaagttgttagagaaaacgtataaattagggataaactatggaacttatgaaatagattgaaatggtttatctgttaccccgtaggatccgcgaggaggttagttatatgcatcatcatcatcatcatgcaagttttcaaagttttggaatacctggacaacttgaagttataaaaaaagcacttgatcatgttagagttggagttgttataactgatcctgcattagaagataatcctatagtttatgttaatcaaggatttgttcaaatgacaggatatgaaacagaagaaatattaggaaaaaatgcaagatttcttcaaggaaaacatacagatcctgcagaagttgataatataagaacagcattacaaaataaagaacctgttacagttcaaatacaaaattataaaaaagatggaacaatgttttggaatgaacttaatatagatcctatggaaatagaagataaaacatattttgttggaatacaaaatgatataacaaaacaaaaagaatatgaaaaacttcttgaagatagtttaacagaaataacagcacttagtacacctatagttcctataagaaatggaataagtgcacttcctcttgttggaaatttaacagaagaaagatttaatagtatagtttgtacacttacaaatatattaagtacaagtaaagatgattatcttataatagatttaagtggacttgcacaagttaatgaacaaacagcagatcaaatatttaaattaagtcatcttcttaaacttacaggaacagaacttataataacaggaataaaacctgaacttgcaatgaaaatgaataaacttgatgcaaattttagtagtttaaagacatattcaaatgttaaagatgcagttaaagttttacctataatgtaaaaggaaaaaagcggccgcataatgcttaagccgctcgagcggccttaattaaggggcgccacttaatgatttgccagtaaaagagattgtttctagctctcacattcttgcagatataatattgcctagagctgaagttatatatgattatcttaagtaataaaaataagagttaccttaaatggtaactcttatttttttaatgtcgactcatagaattcgtaatcatggtcatagctgtttcctgtgtgaaattgttatccgctcacaattccacacaacatacgagccggaagcaaaacgagtgactcgagaacatgtgagcaataaaaataagaagcctgcatttgcaggcttcttatttttatagaccggggacttatcagccaacctgtaggccagcaaaaggccaggaaccgtaaaaaggccgcgttgctggcgtttttccataggctccgcccccctgacgagcatcacaaaaatcgacgctcaagtcagaggtggcgaaacccgacaggactataaagataccaggcgtttccccctggaagctccctcgtgcgctctcctgttccgaccctgccgcttaccggatacctgtccgcctttctcccttcgggaagcgtggcgctttctcatagctcacgctgtaggtatctcagttcggtgtaggtcgttcgctccaagctgggctgtgtgcacgaaccccccgttcagcccgaccgctgcgccttatccggtaactatcgtcttgagtccaacccggtaagacacgacttatcgccactggcagcagccactggtaacaggattagcagagcgaggtatgtaggcggtgctacagagttcttgaagtggtggcctaactacggctacactagaagaacagtatttggtatctgcgctctgctgaagccagttaccttcggaaaaagagttggtagctcttgatccggcaaacaaaccaccgctggtagcggtggtttttttgtttgcaagcagcagattacgcgcagaaaaaaaggatctcaagaagatcctttgatcttttctacggggtctgacgctcagtggaacgaaaactcacgttaagggattttggtcatgagattatcaaaaaggatcttcacctagatccttttaaattaaaaatgaagttttaaatcaatctaaagtatatatgagtaaacttggtctgacagttaccaatgcttaatcagtgaggcacctatctcagcgatctgtctatttcgttcatccatagttgcctgactccccgtcgtgtagataactacgatacgggagggcttaccatctggccccagtgctgcaatgataccgcgagacccacgctcaccggctccagatttatcagcaataaaccagccagccggaagggccgagcgcagaagtggtcctgcaactttatccgcctccatccagtctattaattgttgccgggaagctagagtaagtagttcgccagttaatagtttgcgcaacgttgttgccattgctacaggcatcgtggtgtcacgctcgtcgtttggtatggcttcattcagctccggttcccaacgatcaaggcgagttacatgatcccccatgttgtgcaaaaaagcggttagctccttcggtcctccgatcgttgtcagaagtaagttggccgcagtgttatcactcatggttatggcagcactgcataattctcttactgtcatgccatccgtaagatgcttttctgtgactggtgagtactcaaccaagtcattctgagaatagtgtatgcggcgaccgagttgctcttgcccggcgtcaatacgggataataccgcgccacatagcagaactttaaaagtgctcatcattggaaaacgttcttcggggcgaaaactctcaaggatcttaccgctgttgagatccagttcgatgtaacccactcgtgcacccaactgatcttcagcatcttttactttcaccagcgtttctgggtgagcaaaaacaggaaggcaaaatgccgcaaaaaagggaataagggcgacacggaaatgttgaatactcatactcttcctttttcaatattattgaagcatttatcagggttattgtctcatgagcggatacatatttgaatgtatttagaaaaataaacaaataggggttccgcgcacatttccccgaaaagtgccacctg

SEQ ID NO: 11 - DNA, 8617 bp, artificial sequence
  plasmid BG133
acggtcctgcaggtaatacgactcactatagggataacttaaatttatattttttactttataatatataattgattatagaatccaaattagataggaggaccaggtaaatggagaataattttattgtcaacgaaaacgagaaaagggttttaaagcagatatttaacaactccaatatcagtagaactcaaatttccaagaatttagaactgaataaagcaacaatttcgaacattcttaacaatctaaagcataaaagtttggtaaatgaagttggtgaaggaaattctactaaaagtggtggaagaaaacctatacttctcgaaattaatcaaaagtatgggtattatataagcatggatttgacatatgattctgttgagttaatgtataactattttgatgctacaattctcaaacaagatagttatgaactgaatgataagaatgtaagtagcatattacagatactcaaatctaacataaatgttagcgaaaaatacgacacattatacggtttattagggataagtatatccatacatgggattgtagatgatgaacaaaacatcattaatctaccatttcacaagaatgaaaaaagaacgtttactgatgaacttaagtctttcactaatgtaccagtggttattgaaaatgaggcaaatttaagtgcattatacgagaaaagtttatacatcaattcgaatattaacaacttgatcacattgtctatacataaaggtataggagctggcatcataatcaataagaaactctatagaggtagtaatggagaagctggagaaataggaaagactcttgttttagagtctatcaataacaatgataacaagtactataaaatagaggatatttgtagtcaagacgctttgatacaaaagattaataacagattaggagttacacttacatttaccgaactaatacagtattataacgaaggaaatagtattgtagctcatgaaatcaaacagtttatcaacaaaatgactgtcttaatacacaatcttaatactcagtttaatccagatgcaatatacatcaattgtcccttgattaatgaacttcctaatattctaaacgaaatcaaagaacaattctcttgtttttcacaaggaagtcctatacaattgcatttaaccactaatgttaaacaagctacattattaggtggaacattagcaattatgcagaaaacccttaacataaacaatatccaaatgaatattaaatagttacagcagtctgagttataaaatagatatctcggaccgtctattcttccttatttgagtgggtaccaatgaaatctttcgagctaaatcgatttctggcccactcttttttattttttagtaagcgtttacaaaaaatgaacaatgtgctatattacctctaaagttagtttgtttattaaattaaccaactaaaatgtcgggatccaggaggctgagctgatggaaaagaaggaatttagagttttaataaagtattgttttcttaaaggaaagaatacagtagaagctaagacttggttagataatgaatttccagattctgctcctggtaaaagtacaattatagattggtatgcaaaatttaaaagaggagaaatgtcaacagaagatggagaaagatctggtagaccaaaagaagttgtaactgatgaaaatataaagaagatacataaaatgatattaaatgatagaaagatgaagttaatagaaatagcagaagctttaaaaatatctaaagaaagagttggacatataatacatcaatatttagatatgagaaaattatgtgcaaaatgggttccaagagaattaacttttgatcaaaagcaaagaagagtagatgatagtaagagatgtttacaattattaacaagaaatactccagaatttttcagaagatatgtaacaatggatgaaacttggttacatcattatacacctgaaagtaatagacaatcagcagaatggacagctactggagaaccatcacctaaaagaggaaagactcaaaagagtgctggaaaggttatggcatcagtattttgggatgctcatggtataatatttatagattatttagaaaaaggaaaaacaataaattctgattattatatggcattattagaaagattaaaagttgaaatagcagctaaaagaccacatatgaagaagaaaaaagtattatttcatcaagataatgctccttgtcataagtcattaagaactatggcaaagatacatgaattaggttttgaattattaccacatccaccttattcaccagatttagctccttctgatttctttttatttagtgatttaaagagaatgttagcaggaaagaagtttggttgtaatgaagaagttatagcagaaacagaagcttattttgaagcaaaacctaaggaatattatcaaaatggaataaagaagttagaaggtagatataatagatgtatagcattagaaggaaattatgtagaataagaattccttaattaaggagctcgataaaaataagaagcctgcatttgcaggcttcttatttttatggtcatagctgtttcctggcgcgccgcattcacttcttttctatataaatatgagcgaagcgaataagcgtcggaaaagcagcaaaaagtttcctttttgctgttggagcatgggggttcagggggtgcagtatctgacgtcaatgccgagcgaaagcgagccgaagggtagcatttacgttagataaccccctgatatgctccgacgctttatatagaaaagaagattcaactaggtaaaatcttaatataggttgagatgataaggtttataaggaatttgtttgttctaatttttcactcattttgttctaatttcttttaacaaatgttcttttttttttagaacagttatgatatagttagaatagtttaaaataaggagtgagaaaaagatgaaagaaagatatggaacagtctataaaggctctcagaggctcatagacgaagaaagtggagaagtcatagaggtagacaagttataccgtaaacaaacgtctggtaacttcgtaaaggcatatatagtgcaattaataagtatgttagatatgattggcggaaaaaaacttaaaatcgttaactatatcctagataatgtccacttaagtaacaatacaatgatagctacaacaagagaaatagcaaaagctacaggaacaagtctacaaacagtaataacaacacttaaaatcttagaagaaggaaatattataaaaagaaaaactggagtattaatgttaaaccctgaactactaatgagaggcgacgaccaaaaacaaaaatacctcttactcgaatttgggaactttgagcaagaggcaaatgaaatagattgacctcccaataacaccacgtagttattgggaggtcaatctatgaaatgcgattaagggccggccagtgggcaagttgaaaaattcacaaaaatgtggtataatatctttgttcattagagcgataaacttgaatttgagagggaacttagatggtatttgaaaaaattgataaaaatagttggaacagaaaagagtattttgaccactactttgcaagtgtaccttgtacctacagcatgaccgttaaagtggatatcacacaaataaaggaaaagggaatgaaactatatcctgcaatgctttattatattgcaatgattgtaaaccgccattcagagtttaggacggcaatcaatcaagatggtgaattggggatatatgatgagatgataccaagctatacaatatttcacaatgatactgaaacattttccagcctttggactgagtgtaagtctgactttaaatcatttttagcagattatgaaagtgatacgcaacggtatggaaacaatcatagaatggaaggaaagccaaatgctccggaaaacatttttaatgtatctatgataccgtggtcaaccttcgatggctttaatctgaatttgcagaaaggatatgattatttgattcctatttttactatggggaaatattataaagaagataacaaaattatacttcctttggcaattcaagttcatcacgcagtatgtgacggatttcacatttgccgttttgtaaacgaattgcaggaattgataaatagttaacttcaggtttgtctgtaactaaaaacaagtatttaagcaaaaacatcgtagaaatacggtgttttttgttaccctaagtttacaggttggctgataagtccccggtctgaagttcctattctctagaaagtataggaacttcttccgacgcttattcgcttcgctcatatttatatagaaaagaagtgaatgcgcaaaagacataatcgattcacaaaaaataggtacacgaaaaacaagttaagggatgcagtttatgcatcccttaacttacttattaaataatttatagctattgaaaagagataagaattgttcaaagctaatattgtttaaatcgtcaattcctgcatgttttaaggaattgttaaattgattttttgtaaatattttcttgtattctttgttaacccatttcataacgaaataattatacttctgtttatctttgtgtgatattcttgatttttttctatttaatctgataagtgagctattcactttaggtttaggatgaaaatattctcttggaaccatacttaatatagaaatatcaacttctgccattaaaaataatgccaatgagcgttttgtatttaataatcttttagcaaacccgtattccacgattaaataaatctcatcagctatactatcaaaaacaattttgcgtattatatccgtacttatgttataaggtatattaccaaatattttataggattggtttttaggaaatttaaactgcaatatatccttgtttaaaacttggaaattatcgtgatcaacaagtttattttctgtagttttgcataatttatggtctatttcaatggcagttacgaaattacacctctgtactaattcaagggtaaaatgcccttttcctgagccgatttcaaagatattatcatgttcatttaatcttatatttgtcattattttatctatattatgttttgaagtaataaagttttgactgtgttttatatttttctcgttcattataaccctctttattttttcctccttataaaattagtataattatagcacgagctctgataaatatgaacatgatgagtgatcgttaaatttatactgcaatctgatgcgattattgaagttcctattctctagaaagtataggaacttcacggcagtgaagtttaaacgcatttaagcgtcagagcatggctttatgccgagaaaactattggttggaatggcgtgtgtgttagccaaagctcctgcaggtcgactttttaacaaaatatattgataaaaataataatagtgggtataattaagttgttagagaaaacgtataaattagggataaactatggaacttatgaaatagattgaaatggtttatctgttaccccgtaggatccgcgaggaggttagttatatgcatcatcatcatcatcatgcaagttttcaaagttttggaatacctggacaacttgaagttataaaaaaagcacttgatcatgttagagttggagttgttataactgatcctgcattagaagataatcctatagtttatgttaatcaaggatttgttcaaatgacaggatatgaaacagaagaaatattaggaaaaaatgcaagatttcttcaaggaaaacatacagatcctgcagaagttgataatataagaacagcattacaaaataaagaacctgttacagttcaaatacaaaattataaaaaagatggaacaatgttttggaatgaacttaatatagatcctatggaaatagaagataaaacatattttgttggaatacaaaatgatataacaaaacaaaaagaatatgaaaaacttcttgaagatagtttaacagaaataacagcacttagtacacctatagttcctataagaaatggaataagtgcacttcctcttgttggaaatttaacagaagaaagatttaatagtatagtttgtacacttacaaatatattaagtacaagtaaagatgattatcttataatagatttaagtggacttgcacaagttaatgaacaaacagcagatcaaatatttaaattaagtcatcttcttaaacttacaggaacagaacttataataacaggaataaaacctgaacttgcaatgaaaatgaataaacttgatgcaaattttagtagtttaaagacatattcaaatgttaaagatgcagttaaagttttacctataatgtaaaaggaaaaaagcggccgcataatgcttaagccgctcgagcggccttaattaaggggcgccacttaatgatttgccagtaaaagagattgtttctagctctcacattcttgcagatataatattgcctagagctgaagttatatatgattatcttaagtaataaaaataagagttaccttaaatggtaactcttatttttttaatgtcgactcatagaattcgtaatcatggtcatagctgtttcctgtgtgaaattgttatccgctcacaattccacacaacatacgagccggaagcaaaacgagtgactcgagaacatgtgagcaataaaaataagaagcctgcatttgcaggcttcttatttttatagaccggggacttatcagccaacctgtaggccagcaaaaggccaggaaccgtaaaaaggccgcgttgctggcgtttttccataggctccgcccccctgacgagcatcacaaaaatcgacgctcaagtcagaggtggcgaaacccgacaggactataaagataccaggcgtttccccctggaagctccctcgtgcgctctcctgttccgaccctgccgcttaccggatacctgtccgcctttctcccttcgggaagcgtggcgctttctcatagctcacgctgtaggtatctcagttcggtgtaggtcgttcgctccaagctgggctgtgtgcacgaaccccccgttcagcccgaccgctgcgccttatccggtaactatcgtcttgagtccaacccggtaagacacgacttatcgccactggcagcagccactggtaacaggattagcagagcgaggtatgtaggcggtgctacagagttcttgaagtggtggcctaactacggctacactagaagaacagtatttggtatctgcgctctgctgaagccagttaccttcggaaaaagagttggtagctcttgatccggcaaacaaaccaccgctggtagcggtggtttttttgtttgcaagcagcagattacgcgcagaaaaaaaggatctcaagaagatcctttgatcttttctacggggtctgacgctcagtggaacgaaaactcacgttaagggattttggtcatgagattatcaaaaaggatcttcacctagatccttttaaattaaaaatgaagttttaaatcaatctaaagtatatatgagtaaacttggtctgacagttaccaatgcttaatcagtgaggcacctatctcagcgatctgtctatttcgttcatccatagttgcctgactccccgtcgtgtagataactacgatacgggagggcttaccatctggccccagtgctgcaatgataccgcgagacccacgctcaccggctccagatttatcagcaataaaccagccagccggaagggccgagcgcagaagtggtcctgcaactttatccgcctccatccagtctattaattgttgccgggaagctagagtaagtagttcgccagttaatagtttgcgcaacgttgttgccattgctacaggcatcgtggtgtcacgctcgtcgtttggtatggcttcattcagctccggttcccaacgatcaaggcgagttacatgatcccccatgttgtgcaaaaaagcggttagctccttcggtcctccgatcgttgtcagaagtaagttggccgcagtgttatcactcatggttatggcagcactgcataattctcttactgtcatgccatccgtaagatgcttttctgtgactggtgagtactcaaccaagtcattctgagaatagtgtatgcggcgaccgagttgctcttgcccggcgtcaatacgggataataccgcgccacatagcagaactttaaaagtgctcatcattggaaaacgttcttcggggcgaaaactctcaaggatcttaccgctgttgagatccagttcgatgtaacccactcgtgcacccaactgatcttcagcatcttttactttcaccagcgtttctgggtgagcaaaaacaggaaggcaaaatgccgcaaaaaagggaataagggcgacacggaaatgttgaatactcatactcttcctttttcaatattattgaagcatttatcagggttattgtctcatgagcggatacatatttgaatgtatttagaaaaataaacaaataggggttccgcgcacatttccccgaaaagtgccacctg

SEQ ID NO: 12 - DNA, 9871 bp, artificial sequence
  plasmid BG134
acggtcctgcaggtaatacgactcactatagggataacttaaatttatattttttactttataatatataattgattatagaatccaaattagataggaggaccaggtaaatggagaataattttattgtcaacgaaaacgagaaaagggttttaaagcagatatttaacaactccaatatcagtagaactcaaatttccaagaatttagaactgaataaagcaacaatttcgaacattcttaacaatctaaagcataaaagtttggtaaatgaagttggtgaaggaaattctactaaaagtggtggaagaaaacctatacttctcgaaattaatcaaaagtatgggtattatataagcatggatttgacatatgattctgttgagttaatgtataactattttgatgctacaattctcaaacaagatagttatgaactgaatgataagaatgtaagtagcatattacagatactcaaatctaacataaatgttagcgaaaaatacgacacattatacggtttattagggataagtatatccatacatgggattgtagatgatgaacaaaacatcattaatctaccatttcacaagaatgaaaaaagaacgtttactgatgaacttaagtctttcactaatgtaccagtggttattgaaaatgaggcaaatttaagtgcattatacgagaaaagtttatacatcaattcgaatattaacaacttgatcacattgtctatacataaaggtataggagctggcatcataatcaataagaaactctatagaggtagtaatggagaagctggagaaataggaaagactcttgttttagagtctatcaataacaatgataacaagtactataaaatagaggatatttgtagtcaagacgctttgatacaaaagattaataacagattaggagttacacttacatttaccgaactaatacagtattataacgaaggaaatagtattgtagctcatgaaatcaaacagtttatcaacaaaatgactgtcttaatacacaatcttaatactcagtttaatccagatgcaatatacatcaattgtcccttgattaatgaacttcctaatattctaaacgaaatcaaagaacaattctcttgtttttcacaaggaagtcctatacaattgcatttaaccactaatgttaaacaagctacattattaggtggaacattagcaattatgcagaaaacccttaacataaacaatatccaaatgaatattaaatagttacagcagtctgagttataaaatagatatctcggaccgtctattcttccttatttgagtgggtaccaatgaaatctttcgagctaaatcgatttctggcccactcttttttattttttagtaagcgtttacaaaaaatgaacaatgtgctatattacctctaaagttagtttgtttattaaattaaccaactaaaatgtcgggatccaattaggaggaatctgcgatggaaaagaaggaatttagagttttaataaagtattgttttcttaaaggaaagaatacagtagaagctaagacttggttagataatgaatttccagattctgctcctggtaaaagtacaattatagattggtatgcaaaatttaaaagaggagaaatgtcaacagaagatggagaaagatctggtagaccaaaagaagttgtaactgatgaaaatataaagaagatacataaaatgatattaaatgatagaaagatgaagttaatagaaatagcagaagctttaaaaatatctaaagaaagagttggacatataatacatcaatatttagatatgagaaaattatgtgcaaaatgggttccaagagaattaacttttgatcaaaagcaaagaagagtagatgatagtaagagatgtttacaattattaacaagaaatactccagaatttttcagaagatatgtaacaatggatgaaacttggttacatcattatacacctgaaagtaatagacaatcagcagaatggacagctactggagaaccatcacctaaaagaggaaagactcaaaagagtgctggaaaggttatggcatcagtattttgggatgctcatggtataatatttatagattatttagaaaaaggaaaaacaataaattctgattattatatggcattattagaaagattaaaagttgaaatagcagctaaaagaccacatatgaagaagaaaaaagtattatttcatcaagataatgctccttgtcataagtcattaagaactatggcaaagatacatgaattaggttttgaattattaccacatccaccttattcaccagatttagctccttctgatttctttttatttagtgatttaaagagaatgttagcaggaaagaagtttggttgtaatgaagaagttatagcagaaacagaagcttattttgaagcaaaacctaaggaatattatcaaaatggaataaagaagttagaaggtagatataatagatgtatagcattagaaggaaattatgtagaataagaattccttaattaaggagctcgataaaaataagaagcctgcatttgcaggcttcttatttttatggtcatagctgtttcctggcgcgccgcattcacttcttttctatataaatatgagcgaagcgaataagcgtcggaaaagcagcaaaaagtttcctttttgctgttggagcatgggggttcagggggtgcagtatctgacgtcaatgccgagcgaaagcgagccgaagggtagcatttacgttagataaccccctgatatgctccgacgctttatatagaaaagaagattcaactaggtaaaatcttaatataggttgagatgataaggtttataaggaatttgtttgttctaatttttcactcattttgttctaatttcttttaacaaatgttcttttttttttagaacagttatgatatagttagaatagtttaaaataaggagtgagaaaaagatgaaagaaagatatggaacagtctataaaggctctcagaggctcatagacgaagaaagtggagaagtcatagaggtagacaagttataccgtaaacaaacgtctggtaacttcgtaaaggcatatatagtgcaattaataagtatgttagatatgattggcggaaaaaaacttaaaatcgttaactatatcctagataatgtccacttaagtaacaatacaatgatagctacaacaagagaaatagcaaaagctacaggaacaagtctacaaacagtaataacaacacttaaaatcttagaagaaggaaatattataaaaagaaaaactggagtattaatgttaaaccctgaactactaatgagaggcgacgaccaaaaacaaaaatacctcttactcgaatttgggaactttgagcaagaggcaaatgaaatagattgacctcccaataacaccacgtagttattgggaggtcaatctatgaaatgcgattaagggaacttaacttcatgtgaaaagtttgttaaaatatacgattactatattattataaagggggagttaaaatggatatcataaatatgttagatgaaaaattcaagaatatttttaaaaggcattatgaaaatgttttcttttctccaggaagagttaatttaataggagaacatactgattacaacggtggacatgtatttccttgtgccttaaccatcggtacttacggattagttgctagacgaaatgataataaagtattagcttattccttaaattttgataatttaggtgtaattgaatttagcttagatgatttaaaaaaatgcaaaaaagatgactgggcaaactatgttaagggagttatagatacttttaataaacatggtcacaatatagaaaatggttttgagattcttttttatggaagcataccaaatggatcaggtttatcttcttctgcttctatagaagttttaactggtatcatactaaatgatttatttaaattaaatattaatatggtagaaatagttaaaatgtgccaggaagcagaaaattccttcataggtgtaaactgcggtataatggatcaattctccatcggaatgggtaaaaaggattgtgccatactccttgattgcagtactctagaatattcttatagtaaattaaatatgacaggctataaaatagtcatagcaaatacaaataaaaaaagaggccttgcagattcaaaatataatgaaaggcgcagtgaatgcgaagctgctctaaaagaacttcaaaaggttaaaaatataaattccttaggcgaacttacagaggctgaatttgaagaattaaaagacatcatttcggaccctgtaaaactaagaagagccagacatgctgtttatgaaaatcaaagaaccttaaaggctgttgtttcacttaataacaacgatttaaaaaccttcggaaaacttatgaatgaatcacatatttccttaagagatgattatgaggttacaggaattgaactagatactttagtttctttagccttagagtcaaagggagttatcggctcaagaatgacaggtgcaggcttcggaggttgcactgtaagcatagttaaagaagactatgtagacgaattcatagaaagtattaaagcaaaatatacagaaaagatcggctatgaaccaagtttctatattgtaaacatagctgatggtgctaaaaaaataaactagtaaatgcgatggccggccagtgggcaagttgaaaaattcacaaaaatgtggtataatatctttgttcattagagcgataaacttgaatttgagagggaacttagatggtatttgaaaaaattgataaaaatagttggaacagaaaagagtattttgaccactactttgcaagtgtaccttgtacctacagcatgaccgttaaagtggatatcacacaaataaaggaaaagggaatgaaactatatcctgcaatgctttattatattgcaatgattgtaaaccgccattcagagtttaggacggcaatcaatcaagatggtgaattggggatatatgatgagatgataccaagctatacaatatttcacaatgatactgaaacattttccagcctttggactgagtgtaagtctgactttaaatcatttttagcagattatgaaagtgatacgcaacggtatggaaacaatcatagaatggaaggaaagccaaatgctccggaaaacatttttaatgtatctatgataccgtggtcaaccttcgatggctttaatctgaatttgcagaaaggatatgattatttgattcctatttttactatggggaaatattataaagaagataacaaaattatacttcctttggcaattcaagttcatcacgcagtatgtgacggatttcacatttgccgttttgtaaacgaattgcaggaattgataaatagttaacttcaggtttgtctgtaactaaaaacaagtatttaagcaaaaacatcgtagaaatacggtgttttttgttaccctaagtttacaggttggctgataagtccccggtctgaagttcctattctctagaaagtataggaacttcttccgacgcttattcgcttcgctcatatttatatagaaaagaagtgaatgcgcaaaagacataatcgattcacaaaaaataggtacacgaaaaacaagttaagggatgcagtttatgcatcccttaacttacttattaaataatttatagctattgaaaagagataagaattgttcaaagctaatattgtttaaatcgtcaattcctgcatgttttaaggaattgttaaattgattttttgtaaatattttcttgtattctttgttaacccatttcataacgaaataattatacttctgtttatctttgtgtgatattcttgatttttttctatttaatctgataagtgagctattcactttaggtttaggatgaaaatattctcttggaaccatacttaatatagaaatatcaacttctgccattaaaaataatgccaatgagcgttttgtatttaataatcttttagcaaacccgtattccacgattaaataaatctcatcagctatactatcaaaaacaattttgcgtattatatccgtacttatgttataaggtatattaccaaatattttataggattggtttttaggaaatttaaactgcaatatatccttgtttaaaacttggaaattatcgtgatcaacaagtttattttctgtagttttgcataatttatggtctatttcaatggcagttacgaaattacacctctgtactaattcaagggtaaaatgcccttttcctgagccgatttcaaagatattatcatgttcatttaatcttatatttgtcattattttatctatattatgttttgaagtaataaagttttgactgtgttttatatttttctcgttcattataaccctctttattttttcctccttataaaattagtataattatagcacgagctctgataaatatgaacatgatgagtgatcgttaaatttatactgcaatctgatgcgattattgaagttcctattctctagaaagtataggaacttcacggcagtgaagtttaaacgcatttaagcgtcagagcatggctttatgccgagaaaactattggttggaatggcgtgtgtgttagccaaagctcctgcaggtcgactttttaacaaaatatattgataaaaataataatagtgggtataattaagttgttagagaaaacgtataaattagggataaactatggaacttatgaaatagattgaaatggtttatctgttaccccgtaggatccgcgaggaggttagttatatgcatcatcatcatcatcatgcaagttttcaaagttttggaatacctggacaacttgaagttataaaaaaagcacttgatcatgttagagttggagttgttataactgatcctgcattagaagataatcctatagtttatgttaatcaaggatttgttcaaatgacaggatatgaaacagaagaaatattaggaaaaaatgcaagatttcttcaaggaaaacatacagatcctgcagaagttgataatataagaacagcattacaaaataaagaacctgttacagttcaaatacaaaattataaaaaagatggaacaatgttttggaatgaacttaatatagatcctatggaaatagaagataaaacatattttgttggaatacaaaatgatataacaaaacaaaaagaatatgaaaaacttcttgaagatagtttaacagaaataacagcacttagtacacctatagttcctataagaaatggaataagtgcacttcctcttgttggaaatttaacagaagaaagatttaatagtatagtttgtacacttacaaatatattaagtacaagtaaagatgattatcttataatagatttaagtggacttgcacaagttaatgaacaaacagcagatcaaatatttaaattaagtcatcttcttaaacttacaggaacagaacttataataacaggaataaaacctgaacttgcaatgaaaatgaataaacttgatgcaaattttagtagtttaaagacatattcaaatgttaaagatgcagttaaagttttacctataatgtaaaaggaaaaaagcggccgcataatgcttaagccgctcgagcggccttaattaaggggcgccacttaatgatttgccagtaaaagagattgtttctagctctcacattcttgcagatataatattgcctagagctgaagttatatatgattatcttaagtaataaaaataagagttaccttaaatggtaactcttatttttttaatgtcgactcatagaattcgtaatcatggtcatagctgtttcctgtgtgaaattgttatccgctcacaattccacacaacatacgagccggaagcaaaacgagtgactcgagaacatgtgagcaataaaaataagaagcctgcatttgcaggcttcttatttttatagaccggggacttatcagccaacctgtaggccagcaaaaggccaggaaccgtaaaaaggccgcgttgctggcgtttttccataggctccgcccccctgacgagcatcacaaaaatcgacgctcaagtcagaggtggcgaaacccgacaggactataaagataccaggcgtttccccctggaagctccctcgtgcgctctcctgttccgaccctgccgcttaccggatacctgtccgcctttctcccttcgggaagcgtggcgctttctcatagctcacgctgtaggtatctcagttcggtgtaggtcgttcgctccaagctgggctgtgtgcacgaaccccccgttcagcccgaccgctgcgccttatccggtaactatcgtcttgagtccaacccggtaagacacgacttatcgccactggcagcagccactggtaacaggattagcagagcgaggtatgtaggcggtgctacagagttcttgaagtggtggcctaactacggctacactagaagaacagtatttggtatctgcgctctgctgaagccagttaccttcggaaaaagagttggtagctcttgatccggcaaacaaaccaccgctggtagcggtggtttttttgtttgcaagcagcagattacgcgcagaaaaaaaggatctcaagaagatcctttgatcttttctacggggtctgacgctcagtggaacgaaaactcacgttaagggattttggtcatgagattatcaaaaaggatcttcacctagatccttttaaattaaaaatgaagttttaaatcaatctaaagtatatatgagtaaacttggtctgacagttaccaatgcttaatcagtgaggcacctatctcagcgatctgtctatttcgttcatccatagttgcctgactccccgtcgtgtagataactacgatacgggagggcttaccatctggccccagtgctgcaatgataccgcgagacccacgctcaccggctccagatttatcagcaataaaccagccagccggaagggccgagcgcagaagtggtcctgcaactttatccgcctccatccagtctattaattgttgccgggaagctagagtaagtagttcgccagttaatagtttgcgcaacgttgttgccattgctacaggcatcgtggtgtcacgctcgtcgtttggtatggcttcattcagctccggttcccaacgatcaaggcgagttacatgatcccccatgttgtgcaaaaaagcggttagctccttcggtcctccgatcgttgtcagaagtaagttggccgcagtgttatcactcatggttatggcagcactgcataattctcttactgtcatgccatccgtaagatgcttttctgtgactggtgagtactcaaccaagtcattctgagaatagtgtatgcggcgaccgagttgctcttgcccggcgtcaatacgggataataccgcgccacatagcagaactttaaaagtgctcatcattggaaaacgttcttcggggcgaaaactctcaaggatcttaccgctgttgagatccagttcgatgtaacccactcgtgcacccaactgatcttcagcatcttttactttcaccagcgtttctgggtgagcaaaaacaggaaggcaaaatgccgcaaaaaagggaataagggcgacacggaaatgttgaatactcatactcttcctttttcaatattattgaagcatttatcagggttattgtctcatgagcggatacatatttgaatgtatttagaaaaataaacaaataggggttccgcgcacatttccccgaaaagtgccacctg

SEQ ID NO: 13 - DNA, 9871 bp, artificial sequence; identical to SEQ ID NO: 12
  plasmid BG135

SEQ ID NO: 14 - DNA, 5095 bp, artificial sequence
  plasmid BG136
tcgcgcgtttcggtgatgacggtgaaaacctctgacacatgcagctcccggagacggtcacagcttgtctgtaagcggatgccgggagcagacaagcccgtcagggcgcgtcagcgggtgttggcgggtgtcggggctggcttaactatgcggcatcagagcagattgtactgagagtgcaccatatgcggtgtgaaataccgcacagatgcgtaaggagaaaataccgcatcaggcgcgccattcgccattcaggctgcgcaactgttgggaagggcgatcggtgcgggcctcttcgctattacgccagctggcgaaagggggatgtgctgcaaggcgattaagttgggtaacgccagggttttcccagtcacgacgttgtaaaacgacggccagtgccaagcttgagcttaatcgcatttcatagattgacctcccaataactacgtggtgttattgggaggtcaatctatttcatttgcctcttgctcaaagttcccaaattcgagtaagaggtatttttgtttttggtcgtcgcctctcattagtagttcagggtttaacattaatactccagtttttctttttataatatttccttcttctaagattttaagtgttgttattactgtttgtagacttgttcctgtagcttttgctatttctcttgttgtagctatcattgtattgttacttaagtggacattatctaggatatagttaacgattttaagtttttttccgccaatcatatctaacatacttattaattgcactatatatgcctttacgaagttaccagacgtttgtttacggtataacttgtctacctctatgacttctccactttcttcgtctatgagcctctgagagcctttatagactgttccatatctttctttcatctttttctcactccttattttaaactattctaactatatcataactgttctaaaaaaaaaagaacatttgttaaaagaaattagaacaaaatgagtgaaaaattagaacaaacaaattccttataaaccttatcatctcaacctatattaagattttacctagttgaatcttcttttctatataaagcgtcggagcatatcagggggttatctaacgtaaatgctacccttcggctcgctttcgctcggcattgacgtcagatactgcaccccctgaacccccatgctccaacagcaaaaaggaaactttttgctgcttttccgacgcttattcgcttcgctcatatttatatagaaaagaagtgaatgcgcaaaagacataatcgattcacaaaaaataggtacacgaaaaacaagttaagggatgcagtttatgcatcccttaacttacttattaaataatttatagctattgaaaagagataagaattgttcaaagctaatattgtttaaatcgtcaattcctgcatgttttaaggaattgttaaattgattttttgtaaatattttcttgtattctttgttaacccatttcataacgaaataattatacttctgtttatctttgtgtgatattcttgatttttttctatttaatctgataagtgagctattcactttaggtttaggatgaaaatattctcttggaaccatacttaatatagaaatatcaacttctgccattaaaaataatgccaatgagcgttttgtatttaataatcttttagcaaacccgtattccacgattaaataaatctcatcagctatactatcaaaaacaattttgcgtattatatccgtacttatgttataaggtatattaccaaatattttataggattggtttttaggaaatttaaactgcaatatatccttgtttaaaacttggaaattatcgtgatcaacaagtttattttctgtagttttgcataatttatggtctatttcaatggcagttacgaaattacacctctgtactaattcaagggtaaaatgcccttttcctgagccgatttcaaagatattatcatgttcatttaatcttatatttgtcattattttatctatattatgttttgaagtaataaagttttgactgtgttttatatttttctcgttcattataaccctctttattttttcctccttataaaattagtataattatagcacgagctctgataaatatgaacatgatgagtgatcgttaaatttatactgcaatctgatgcgattattgaataaaagatatgagagatttatctagtttctttttttacaagaaaaaagaaagttcttaaaggttttatacttttggtcgtagagcacacggtttaacgacttaattacgaagtaaataagtctagtgtgttagactttaatgtttttttaaggcattagtgcatttaagcgtcagagcatggctttatgccgagaaaactattggttggaatggcgtgtgtgttagccaaagctcctgcaggtcgactttttaacaaaatatattgataaaaataataatagtgggtataattaagttgttagagaaaacgtataaattagggataaactatggaacttatgaaatagattgaaatggtttatctgttaccccgtaggatccgcgtcccccgggggactagctagctaggaattcgagctcggcgcgcctgcaggtcgacaagcttgcggccgcataatgcttaagccgctcgagcggccttaattaaggggcgccacttaatgatttgccagtaaaagagattgtttctagctctcacattcttgcagatataatattgcctagagctgaagttatatatgattatcttaagtaataaaaataagagttaccttaaatggtaactcttatttttttaatgtcgactcatagaattcgtaatcatggtcatagctgtttcctgtgtgaaattgttatccgctcacaattccacacaacatacgagccggaagcataaagtgtaaagcctggggtgcctaatgagtgagctaactcacattaattgcgttgcgctcactgcccgctttccagtcgggaaacctgtcgtgccagctgcattaatgaatcggccaacgcgcggggagaggcggtttgcgtattgggcgctcttccgcttcctcgctcactgactcgctgcgctcggtcgttcggctgcggcgagcggtatcagctcactcaaaggcggtaatacggttatccacagaatcaggggataacgcaggaaagaacatgtgagcaaaaggccagcaaaaggccaggaaccgtaaaaaggccgcgttgctggcgtttttccataggctccgcccccctgacgagcatcacaaaaatcgacgctcaagtcagaggtggcgaaacccgacaggactataaagataccaggcgtttccccctggaagctccctcgtgcgctctcctgttccgaccctgccgcttaccggatacctgtccgcctttctcccttcgggaagcgtggcgctttctcaaagctcacgctgtaggtatctcagttcggtgtaggtcgttcgctccaagctgggctgtgtgcacgaaccccccgttcagcccgaccgctgcgccttatccggtaactatcgtcttgagtccaacccggtaagacacgacttatcgccactggcagcagccactggtaacaggattagcagagcgaggtatgtaggcggtgctacagagttcttgaagtggtggcctaactacggctacactagaagaacagtatttggtatctgcgctctgctgaagccagttaccttcggaaaaagagttggtagctcttgatccggcaaacaaaccaccgctggtagcggtggtttttttgtttgcaagcagcagattacgcgcagaaaaaaaggatctcaagaagatcctttgatcttttctacggggtctgacgctcagtggaacgaaaactcacgttaagggattttggtcatgagattatcaaaaaggatcttcacctagatccttttaaattaaaaatgaagttttaaatcaatctaaagtatatatgagtaaacttggtctgacagttaccaatgcttaatcagtgaggcacctatctcagcgatctgtctatttcgttcatccatagttgcctgactccccgtcgtgtagataactacgatacgggagggcttaccatctggccccagtgctgcaatgataccgcgagacccacgctcaccggctccagatttatcagcaataaaccagccagccggaagggccgagcgcagaagtggtcctgcaactttatccgcctccatccagtctattaattgttgccgggaagctagagtaagtagttcgccagttaatagtttgcgcaacgttgttgccattgctacaggcatcgtggtgtcacgctcgtcgtttggtatggcttcattcagctccggttcccaacgatcaaggcgagttacatgatcccccatgttgtgcaaaaaagcggttagctccttcggtcctccgatcgttgtcagaagtaagttggccgcagtgttatcactcatggttatggcagcactgcataattctcttactgtcatgccatccgtaagatgcttttctgtgactggtgagtactcaaccaagtcattctgagaatagtgtatgcggcgaccgagttgctcttgcccggcgtcaatacgggataataccgcgccacatagcagaactttaaaagtgctcatcattggaaaacgttcttcggggcgaaaactctcaaggatcttaccgctgttgagatccagttcgatgtaacccactcgtgcacccaactgatcttcagcatcttttactttcaccagcgtttctgggtgagcaaaaacaggaaggcaaaatgccgcaaaaaagggaataagggcgacacggaaatgttgaatactcatactcttcctttttcaatattattgaagcatttatcagggttattgtctcatgagcggatacatatttgaatgtatttagaaaaataaacaaataggggttccgcgcacatttccccgaaaagtgccacctgacgtctaagaaaccattattatcatgacattaacctataaaaataggcgtatcacgaggccctttcgtc

SEQ ID NO: 15 - DNA, 9165 bp, artificial sequence
  plasmid BG168
acggtcctgcaggtaatacgactcactatagggataacttaaatttatattttttactttataatatataattgattatagaatccaaattagataggaggaccaggtaaatggagaataattttattgtcaacgaaaacgagaaaagggttttaaagcagatatttaacaactccaatatcagtagaactcaaatttccaagaatttagaactgaataaagcaacaatttcgaacattcttaacaatctaaagcataaaagtttggtaaatgaagttggtgaaggaaattctactaaaagtggtggaagaaaacctatacttctcgaaattaatcaaaagtatgggtattatataagcatggatttgacatatgattctgttgagttaatgtataactattttgatgctacaattctcaaacaagatagttatgaactgaatgataagaatgtaagtagcatattacagatactcaaatctaacataaatgttagcgaaaaatacgacacattatacggtttattagggataagtatatccatacatgggattgtagatgatgaacaaaacatcattaatctaccatttcacaagaatgaaaaaagaacgtttactgatgaacttaagtctttcactaatgtaccagtggttattgaaaatgaggcaaatttaagtgcattatacgagaaaagtttatacatcaattcgaatattaacaacttgatcacattgtctatacataaaggtataggagctggcatcataatcaataagaaactctatagaggtagtaatggagaagctggagaaataggaaagactcttgttttagagtctatcaataacaatgataacaagtactataaaatagaggatatttgtagtcaagacgctttgatacaaaagattaataacagattaggagttacacttacatttaccgaactaatacagtattataacgaaggaaatagtattgtagctcatgaaatcaaacagtttatcaacaaaatgactgtcttaatacacaatcttaatactcagtttaatccagatgcaatatacatcaattgtcccttgattaatgaacttcctaatattctaaacgaaatcaaagaacaattctcttgtttttcacaaggaagtcctatacaattgcatttaaccactaatgttaaacaagctacattattaggtggaacattagcaattatgcagaaaacccttaacataaacaatatccaaatgaatattaaatagttacagcagtctgagttataaaatagatatctcggaccgtctattcttccttatttgagtgggtaccaatgaaatctttcgagctaaatcgatttctggcccactcttttttattttttagtaagcgtttacaaaaaatgaacaatgtgctatattacctctaaagttagtttgtttattaaattaaccaactaaaatgtcgggatccaattaggaggaatctgcgatggaaaaaaaggaatttcgtgttttgataaaatactgttttctgaagggaaaaaatacggtggaagcaaaaacttggcttgataatgagtttccggactctgccccagggaaatcaacaataattgattggtatgcaaaattcaagcgtggtgaaatgagcacggaggacggtgaacgcagtggacgcccgaaagaggtggttaccgacgaaaacatcaaaaaaatccacaaaatgattttgaatgaccgtaaaatgaagttgatcgagatagcagaggccttaaagatatcaaaggaacgtgttggtcatatcattcatcaatatttggatatgcggaagctctgtgcaaaatgggtgccgcgcgagctcacatttgaccaaaaacaacaacgtgttgatgattctgagcggtgtttgcagctgttaactcgtaatacacccgagtttttccgtcgatatgtgacaatggatgaaacatggctccatcactacactcctgagtccaatcgacagtcggctgagtggacagcgaccggtgaaccgtctccgaagcgtggaaagactcaaaagtccgctggcaaagtaatggcctctgttttttgggatgcgcatggaataatttttatcgattatcttgagaagggaaaaaccatcaacagtgactattatatggcgttattggagcgtttgaaggtcgaaatcgcggcaaaacggccccacatgaagaagaaaaaagtgttgttccaccaagacaacgcaccgtgccacaagtcattgagaacgatggcaaaaattcatgaattgggcttcgaattgcttccccacccaccgtattctccagatctggcccccagcgactttttcttgttctcagacctcaaaaggatgctcgcagggaaaaaatttggctgcaatgaagaggtgatcgccgaaactgaggcctattttgaggcaaaaccgaaggagtactaccaaaatggtatcaaaaaattggaaggtcgttataatcgttgtatcgctcttgaagggaactatgttgaataagaattccttaattaaggagctcgataaaaataagaagcctgcatttgcaggcttcttatttttatggtcatagctgtttcctggcgcgccgcattcacttcttttctatataaatatgagcgaagcgaataagcgtcggaaaagcagcaaaaagtttcctttttgctgttggagcatgggggttcagggggtgcagtatctgacgtcaatgccgagcgaaagcgagccgaagggtagcatttacgttagataaccccctgatatgctccgacgctttatatagaaaagaagattcaactaggtaaaatcttaatataggttgagatgataaggtttataaggaatttgtttgttctaatttttcactcattttgttctaatttcttttaacaaatgttcttttttttttagaacagttatgatatagttagaatagtttaaaataaggagtgagaaaaagatgaaagaaagatatggaacagtctataaaggctctcagaggctcatagacgaagaaagtggagaagtcatagaggtagacaagttataccgtaaacaaacgtctggtaacttcgtaaaggcatatatagtgcaattaataagtatgttagatatgattggcggaaaaaaacttaaaatcgttaactatatcctagataatgtccacttaagtaacaatacaatgatagctacaacaagagaaatagcaaaagctacaggaacaagtctacaaacagtaataacaacacttaaaatcttagaagaaggaaatattataaaaagaaaaactggagtattaatgttaaaccctgaactactaatgagaggcgacgaccaaaaacaaaaatacctcttactcgaatttgggaactttgagcaagaggcaaatgaaatagattgacctcccaataacaccacgtagttattgggaggtcaatctatgaaatgcgattaagggccggccagtgggcaagttgaaaaattcacaaaaatgtggtataatatctttgttcattagagcgataaacttgaatttgagagggaacttagatggtatttgaaaaaattgataaaaatagttggaacagaaaagagtattttgaccactactttgcaagtgtaccttgtacctacagcatgaccgttaaagtggatatcacacaaataaaggaaaagggaatgaaactatatcctgcaatgctttattatattgcaatgattgtaaaccgccattcagagtttaggacggcaatcaatcaagatggtgaattggggatatatgatgagatgataccaagctatacaatatttcacaatgatactgaaacattttccagcctttggactgagtgtaagtctgactttaaatcatttttagcagattatgaaagtgatacgcaacggtatggaaacaatcatagaatggaaggaaagccaaatgctccggaaaacatttttaatgtatctatgataccgtggtcaaccttcgatggctttaatctgaatttgcagaaaggatatgattatttgattcctatttttactatggggaaatattataaagaagataacaaaattatacttcctttggcaattcaagttcatcacgcagtatgtgacggatttcacatttgccgttttgtaaacgaattgcaggaattgataaatagttaacttcaggtttgtctgtaactaaaaacaagtatttaagcaaaaacatcgtagaaatacggtgttttttgttaccctaagtttaaacgagtgacggaattgtgagcggataacaattccacaggttggctgataagtccccggtctgtaccgttcgtataatgtatgctatacgaagttataggaggttataatgaacgagaaaaatataaaacacagtcaaaactttattacttcaaaacataatatagataaaataatgacaaatataagattaaatgaacatgataatatctttgaaatcggctcaggaaaagggcattttacccttgaattagtacagaggtgtaatttcgtaactgccattgaaatagaccataaattatgcaaaactacagaaaataaacttgttgatcacgataatttccaagttttaaacaaggatatattgcagtttaaatttcctaaaaaccaatcctataaaatatttggtaatataccttataacataagtacggatataatacgcaaaattgtttttgatagtatagctgatgagatttatttaatcgtggaatacgggtttgctaaaagattattaaatacaaaacgctcattggcattatttttaatggcagaagttgatatttctatattaagtatggttccaagagaatattttcatcctaaacctaaagtgaatagctcacttatcagattaaatagaaaaaaatcaagaatatcacacaaagataaacagaagtataattatttcgttatgaaatgggttaacaaagaatacaagaaaatatttacaaaaaatcaatttaacaattccttaaaacatgcaggaattgacgatttaaacaatattagctttgaacaattcttatctcttttcaatagctataaattatttaataagtaagttaagggatgcataaactgcatcccttaacttgtttttcgtgtacctattttttgtgaatcgattatgtcttttgcgcattcgtcgacaattgcatatattgataaaaataataatagtgggtataattaagttgttaggaggttagttagaatgagtagactcgataagtctaaagtgataaattccgcattagaactccttaatgaagttggaattgaaggtctaactaccaggaaattagctcagaaacttggagttgaacaaccaacattgtactggcatgtcaaaaacaaaagagcactcttagatgcattagcaatcgaaatgttagacagacatcatacacacttttgtccattagaaggtgaaagttggcaagactttttgaggaataacgcgaaaagtttcagatgtgctttactatcccatagagatggggctaaagttcacttaggaactagacctacagaaaagcagtatgagacacttgaaaatcagttggcatttctatgtcaacaaggattctcattagagaacgcattatatgctctttcagctgtaggtcatttcacgttaggttgtgttttggaagatcaagaacatcaagttgcaaaagaagagagagaaactcctactacagatagtatgccacctttattacgacaagctatagaactgtttgatcatcaaggagctgaacctgcgtttctctttggattggagttaataatttgcggactagagaaacagcttaagtgtgaaagtggatcttagttagcaccggtcagggtggtgaatgtgaaaccagtaacgttatacgatgtcgcagagtatgccggtgtctcttatcagaccgtttcccgcgtggtgaaccaggccagccacgtttctgcgaaaacgcgggaaaaagtggaagcggcgatggcggagctgaattacattcccaaccgcgtggcacaacaactggcgggcaaacagtcgttgctgattggcgttgccacctccagtctggccctgcacgcgccgtcgcaaattgtcgcggcgattaaatctcgcgccgatcaactgggtgccagcgtggtggtgtcgatggtagaacgaagcggcgtcgaagcctgtaaagcggcggtgcacaatcttctcgcgcaacgcgtcagtgggctgatcattaactatccgctggatgaccaggatgccattgctgtggaagctgcctgcactaatgttccggcgttatttcttgatgtctctgaccagacacccatcaacagtattattttctcccatgaagacggtacgcgactgggcgtggagcatctggtcgcattgggtcaccagcaaatcgcgctgttagcgggcccattaagttctgtctcggcgcgtctgcgtctggctggctggcataaatatctcactcgcaatcaaattcagccgatagcggaacgggaaggcgactggagtgccatgtccggttttcaacaaaccatgcaaatgctgaatgagggcatcgttcccactgcgatgctggttgccaacgatcagatggcgctgggcgcaatgcgcgccattaccgagtccgggctgcgcgttggtgcggacatctcggtagtgggatacgacgataccgaagacagctcatgttatatcccgccgttaaccaccatcaaacaggattttcgcctgctggggcaaaccagcgtggaccgcttgctgcaactctctcagggccaggcggtgaagggcaatcagctgttgcccgtctcactggtgaaaagaaaaaccaccctggcgcccaatacgcaaaccgcctctccccgcgcgttggccgattcattaatgcagctggcacgacaggtttcccgactggaaagcgggcagtgagcgcaacgcaattaatgtaagttagctcactcattaggcaccgggatctcgaccgatgcccttgagagccttcaacccagtcagctccttccggtgggcgcggggcatgactagcatgatcgtgctcctgtcgttgaggacccggctaggctggcggggttgccttactggttagcagaatgaatcaccgatacgcgataacttcgtataatgtatgctatacgaacggtagctcagctagcacccgggtgaaacgagtgactcgagaacatgtgagcaataaaaataagaagcctgcatttgcaggcttcttatttttatagaccggggacttatcagccaacctgtaggccagcaaaaggccaggaaccgtaaaaaggccgcgttgctggcgtttttccataggctccgcccccctgacgagcatcacaaaaatcgacgctcaagtcagaggtggcgaaacccgacaggactataaagataccaggcgtttccccctggaagctccctcgtgcgctctcctgttccgaccctgccgcttaccggatacctgtccgcctttctcccttcgggaagcgtggcgctttctcatagctcacgctgtaggtatctcagttcggtgtaggtcgttcgctccaagctgggctgtgtgcacgaaccccccgttcagcccgaccgctgcgccttatccggtaactatcgtcttgagtccaacccggtaagacacgacttatcgccactggcagcagccactggtaacaggattagcagagcgaggtatgtaggcggtgctacagagttcttgaagtggtggcctaactacggctacactagaagaacagtatttggtatctgcgctctgctgaagccagttaccttcggaaaaagagttggtagctcttgatccggcaaacaaaccaccgctggtagcggtggtttttttgtttgcaagcagcagattacgcgcagaaaaaaaggatctcaagaagatcctttgatcttttctacggggtctgacgctcagtggaacgaaaactcacgttaagggattttggtcatgagattatcaaaaaggatcttcacctagatccttttaaattaaaaatgaagttttaaatcaatctaaagtatatatgagtaaacttggtctgacagttaccaatgcttaatcagtgaggcacctatctcagcgatctgtctatttcgttcatccatagttgcctgactccccgtcgtgtagataactacgatacgggagggcttaccatctggccccagtgctgcaatgataccgcgagacccacgctcaccggctccagatttatcagcaataaaccagccagccggaagggccgagcgcagaagtggtcctgcaactttatccgcctccatccagtctattaattgttgccgggaagctagagtaagtagttcgccagttaatagtttgcgcaacgttgttgccattgctacaggcatcgtggtgtcacgctcgtcgtttggtatggcttcattcagctccggttcccaacgatcaaggcgagttacatgatcccccatgttgtgcaaaaaagcggttagctccttcggtcctccgatcgttgtcagaagtaagttggccgcagtgttatcactcatggttatggcagcactgcataattctcttactgtcatgccatccgtaagatgcttttctgtgactggtgagtactcaaccaagtcattctgagaatagtgtatgcggcgaccgagttgctcttgcccggcgtcaatacgggataataccgcgccacatagcagaactttaaaagtgctcatcattggaaaacgttcttcggggcgaaaactctcaaggatcttaccgctgttgagatccagttcgatgtaacccactcgtgcacccaactgatcttcagcatcttttactttcaccagcgtttctgggtgagcaaaaacaggaaggcaaaatgccgcaaaaaagggaataagggcgacacggaaatgttgaatactcatactcttcctttttcaatattattgaagcatttatcagggttattgtctcatgagcggatacatatttgaatgtatttagaaaaataaacaaataggggttccgcgcacatttccccgaaaagtgccacctg

SEQ ID NO: 16 - DNA, 8963 bp, artificial sequence
  plasmid BG182
acggtcctgcaggtaatacgactcactatagggataacttaaatttatattttttactttataatatataattgattatagaatccaaattagataggaggaccaggtaaatggagaataattttattgtcaacgaaaacgagaaaagggttttaaagcagatatttaacaactccaatatcagtagaactcaaatttccaagaatttagaactgaataaagcaacaatttcgaacattcttaacaatctaaagcataaaagtttggtaaatgaagttggtgaaggaaattctactaaaagtggtggaagaaaacctatacttctcgaaattaatcaaaagtatgggtattatataagcatggatttgacatatgattctgttgagttaatgtataactattttgatgctacaattctcaaacaagatagttatgaactgaatgataagaatgtaagtagcatattacagatactcaaatctaacataaatgttagcgaaaaatacgacacattatacggtttattagggataagtatatccatacatgggattgtagatgatgaacaaaacatcattaatctaccatttcacaagaatgaaaaaagaacgtttactgatgaacttaagtctttcactaatgtaccagtggttattgaaaatgaggcaaatttaagtgcattatacgagaaaagtttatacatcaattcgaatattaacaacttgatcacattgtctatacataaaggtataggagctggcatcataatcaataagaaactctatagaggtagtaatggagaagctggagaaataggaaagactcttgttttagagtctatcaataacaatgataacaagtactataaaatagaggatatttgtagtcaagacgctttgatacaaaagattaataacagattaggagttacacttacatttaccgaactaatacagtattataacgaaggaaatagtattgtagctcatgaaatcaaacagtttatcaacaaaatgactgtcttaatacacaatcttaatactcagtttaatccagatgcaatatacatcaattgtcccttgattaatgaacttcctaatattctaaacgaaatcaaagaacaattctcttgtttttcacaaggaagtcctatacaattgcatttaaccactaatgttaaacaagctacattattaggtggaacattagcaattatgcagaaaacccttaacataaacaatatccaaatgaatattaaatagttacagcagtctgagttataaaatagatatctcggaccgtctattcttccttatttgagtgggtaccaatgaaatctttcgagctaaatcgatttctggcccactcttttttattttttagtaagcgtttacaaaaaatgaacaatgtgctatattacctctaaagttagtttgtttattaaattaaccaactaaaatgtcgggatccaattaggaggaatctgcgatggaaaagaaggaatttagagttttaataaagtattgttttcttaaaggaaagaatacagtagaagctaagacttggttagataatgaatttccagattctgctcctggtaaaagtacaattatagattggtatgcaaaatttaaaagaggagaaatgtcaacagaagatggagaaagatctggtagaccaaaagaagttgtaactgatgaaaatataaagaagatacataaaatgatattaaatgatagaaagatgaagttaatagaaatagcagaagctttaaaaatatctaaagaaagagttggacatataatacatcaatatttagatatgagaaaattatgtgcaaaatgggttccaagagaattaacttttgatcaaaagcaaagaagagtagatgatagtaagagatgtttacaattattaacaagaaatactccagaatttttcagaagatatgtaacaatggatgaaacttggttacatcattatacacctgaaagtaatagacaatcagcagaatggacagctactggagaaccatcacctaaaagaggaaagactcaaaagagtgctggaaaggttatggcatcagtattttgggatgctcatggtataatatttatagattatttagaaaaaggaaaaacaataaattctgattattatatggcattattagaaagattaaaagttgaaatagcagctaaaagaccacatatgaagaagaaaaaagtattatttcatcaagataatgctccttgtcataagtcattaagaactatggcaaagatacatgaattaggttttgaattattaccacatccaccttattcaccagatttagctccttctgatttctttttatttagtgatttaaagagaatgttagcaggaaagaagtttggttgtaatgaagaagttatagcagaaacagaagcttattttgaagcaaaacctaaggaatattatcaaaatggaataaagaagttagaaggtagatataatagatgtatagcattagaaggaaattatgtagaataagaattccttaattaaggagctcgataaaaataagaagcctgcatttgcaggcttcttatttttatggtcatagctgtttcctggcgcgcctgcaatcggatgcgattattgaataaaagatatgagagatttatctaatttcttttttcttgtaaaaaaagaaagttcttaaaggttttatagttttggtcgtagagcacacggtttaacgacttaattacgaagtaaataagtctagtgtgttagactttatgaaatctatatacgtttatatatatttattatccgattttttattaaaacgtctcaaaatcgtttctgagacgttttagcgtttatttcgtttagttatcggcataatcgttaaaacaggcgttatcgtagcgtaaaagcccttgagcgtagcgtggctttgcagcgaagatgttgtctgttagattatgaaagccgatgactgaatgaaataataagcgcagcgcccttctatttcggttggaggaggctcaagggagtatgagggaatgaaattccctcatgggtttgattttaaaaattgcttgcaattttgccgagcggtagcgctggaaaatttttgaaaaaaatttggaatttggaaaaaaatggggggaaaggaagcgaattttgcttccgtactacgaccccccattaagtgccgagtgccaatttttgtgccaaaaacgctctatcccaactggctcaagggtttaaggggtttttcaatcgccaacgaatcgccaacgttttcgccaacgttttttataaatctatatttaagtagctttattgttgtttttatgattacaaagtgatacactaactttataaaattatttgattggagttttttaaatggtgatttcagaatcgaaaaaaagagttatgatttctctgacaaaagagcaagataaaaaattaacagatatggcgaaacaaaaaggtttttcaaaatctgcggttgcggcgttagctatagaagaatatgcaagaaaggaatcagaacaaaaaaaataagcgaaagctcgcgtttttagaaggatacgagttttcgctacttgtttttgataaggtaattatatcatggctattaaaaatactaaagctagaaattttggatttttattatatcctgactcaattcctaatgattggaaagaaaaattagagagtttgggcgtatctatggctgtcagtcctttacacgatatggacgaaaaaaaagataaagatacatggaataatagtaatattatacaaaatggaaagcactataaaaaaccacactatcacgttatatatattgcacgaaatcctgtaacaatagaaagcgttaggaacaagattaagcgaaaattggggaatagttcagttgctcatgttgagatacttgattatatcaaaggttcatatgaatatttgactcatgaatcaaaggacgctattgctaagaataaacatatatacgacaaaaaagatattttgaacattaatgattttgatattgacctctatataacacttgatgaaagccaaaaaagagaattgaagaatttacttttagatatagtggatgactataatttggtaaatacaaaagatttaatggcttttattcgccttaggggagcggagtttggaattttaaatacgaatgatgtaaaagatattgtttcaacaaactctagcgcctttagattatggtttgagggcaattatcagtgtggatatagagcaagttatgcaaaggttcttgatgctgaaacgggggaaataaaatgacaaacaaagaaaaagagttatttgctgaaaatgaggaattaaaaaaagaaattaaggacttaaaagagcgtattgaaagatacagagaaatggaagttgaattaagtacaacaatagatttattgagaggagggattattgaataaataaaagccccctgacgaaagtcgaagggggtttttattttggtttgatgttgcgattaatagcaatacaattgcaggccggccagtgggcaagttgaaaaattcacaaaaatgtggtataatatctttgttcattagagcgataaacttgaatttgagagggaacttagatggtatttgaaaaaattgataaaaatagttggaacagaaaagagtattttgaccactactttgcaagtgtaccttgtacctacagcatgaccgttaaagtggatatcacacaaataaaggaaaagggaatgaaactatatcctgcaatgctttattatattgcaatgattgtaaaccgccattcagagtttaggacggcaatcaatcaagatggtgaattggggatatatgatgagatgataccaagctatacaatatttcacaatgatactgaaacattttccagcctttggactgagtgtaagtctgactttaaatcatttttagcagattatgaaagtgatacgcaacggtatggaaacaatcatagaatggaaggaaagccaaatgctccggaaaacatttttaatgtatctatgataccgtggtcaaccttcgatggctttaatctgaatttgcagaaaggatatgattatttgattcctatttttactatggggaaatattataaagaagataacaaaattatacttcctttggcaattcaagttcatcacgcagtatgtgacggatttcacatttgccgttttgtaaacgaattgcaggaattgataaatagttaacttcaggtttgtctgtaactaaaaacaagtatttaagcaaaaacatcgtagaaatacggtgttttttgttaccctaagtttaaacgagtgacggaattgtgagcggataacaattccacaggttggctgataagtccccggtctgtaccgttcgtataatgtatgctatacgaagttataggaggttataatgaacgagaaaaatataaaacacagtcaaaactttattacttcaaaacataatatagataaaataatgacaaatataagattaaatgaacatgataatatctttgaaatcggctcaggaaaagggcattttacccttgaattagtacagaggtgtaatttcgtaactgccattgaaatagaccataaattatgcaaaactacagaaaataaacttgttgatcacgataatttccaagttttaaacaaggatatattgcagtttaaatttcctaaaaaccaatcctataaaatatttggtaatataccttataacataagtacggatataatacgcaaaattgtttttgatagtatagctgatgagatttatttaatcgtggaatacgggtttgctaaaagattattaaatacaaaacgctcattggcattatttttaatggcagaagttgatatttctatattaagtatggttccaagagaatattttcatcctaaacctaaagtgaatagctcacttatcagattaaatagaaaaaaatcaagaatatcacacaaagataaacagaagtataattatttcgttatgaaatgggttaacaaagaatacaagaaaatatttacaaaaaatcaatttaacaattccttaaaacatgcaggaattgacgatttaaacaatattagctttgaacaattcttatctcttttcaatagctataaattatttaataagtaagttaagggatgcataaactgcatcccttaacttgtttttcgtgtacctattttttgtgaatcgattatgtcttttgcgcattcgtcgacaattgcatatattgataaaaataataatagtgggtataattaagttgttaggaggttagttagaatgagtagactcgataagtctaaagtgataaattccgcattagaactccttaatgaagttggaattgaaggtctaactaccaggaaattagctcagaaacttggagttgaacaaccaacattgtactggcatgtcaaaaacaaaagagcactcttagatgcattagcaatcgaaatgttagacagacatcatacacacttttgtccattagaaggtgaaagttggcaagactttttgaggaataacgcgaaaagtttcagatgtgctttactatcccatagagatggggctaaagttcacttaggaactagacctacagaaaagcagtatgagacacttgaaaatcagttggcatttctatgtcaacaaggattctcattagagaacgcattatatgctctttcagctgtaggtcatttcacgttaggttgtgttttggaagatcaagaacatcaagttgcaaaagaagagagagaaactcctactacagatagtatgccacctttattacgacaagctatagaactgtttgatcatcaaggagctgaacctgcgtttctctttggattggagttaataatttgcggactagagaaacagcttaagtgtgaaagtggatcttagttagcttccttagctcctgaaaatctcgataactcaaccataacttcgtataatgtatgctatacgaacggtagctcagctagcacccgggtgaaacgagtgactcgagaacatgtgagcaataaaaataagaagcctgcatttgcaggcttcttatttttatagaccggggacttatcagccaacctgtaggccagcaaaaggccaggaaccgtaaaaaggccgcgttgctggcgtttttccataggctccgcccccctgacgagcatcacaaaaatcgacgctcaagtcagaggtggcgaaacccgacaggactataaagataccaggcgtttccccctggaagctccctcgtgcgctctcctgttccgaccctgccgcttaccggatacctgtccgcctttctcccttcgggaagcgtggcgctttctcatagctcacgctgtaggtatctcagttcggtgtaggtcgttcgctccaagctgggctgtgtgcacgaaccccccgttcagcccgaccgctgcgccttatccggtaactatcgtcttgagtccaacccggtaagacacgacttatcgccactggcagcagccactggtaacaggattagcagagcgaggtatgtaggcggtgctacagagttcttgaagtggtggcctaactacggctacactagaagaacagtatttggtatctgcgctctgctgaagccagttaccttcggaaaaagagttggtagctcttgatccggcaaacaaaccaccgctggtagcggtggtttttttgtttgcaagcagcagattacgcgcagaaaaaaaggatctcaagaagatcctttgatcttttctacggggtctgacgctcagtggaacgaaaactcacgttaagggattttggtcatgagattatcaaaaaggatcttcacctagatccttttaaattaaaaatgaagttttaaatcaatctaaagtatatatgagtaaacttggtctgacagttaccaatgcttaatcagtgaggcacctatctcagcgatctgtctatttcgttcatccatagttgcctgactccccgtcgtgtagataactacgatacgggagggcttaccatctggccccagtgctgcaatgataccgcgagacccacgctcaccggctccagatttatcagcaataaaccagccagccggaagggccgagcgcagaagtggtcctgcaactttatccgcctccatccagtctattaattgttgccgggaagctagagtaagtagttcgccagttaatagtttgcgcaacgttgttgccattgctacaggcatcgtggtgtcacgctcgtcgtttggtatggcttcattcagctccggttcccaacgatcaaggcgagttacatgatcccccatgttgtgcaaaaaagcggttagctccttcggtcctccgatcgttgtcagaagtaagttggccgcagtgttatcactcatggttatggcagcactgcataattctcttactgtcatgccatccgtaagatgcttttctgtgactggtgagtactcaaccaagtcattctgagaatagtgtatgcggcgaccgagttgctcttgcccggcgtcaatacgggataataccgcgccacatagcagaactttaaaagtgctcatcattggaaaacgttcttcggggcgaaaactctcaaggatcttaccgctgttgagatccagttcgatgtaacccactcgtgcacccaactgatcttcagcatcttttactttcaccagcgtttctgggtgagcaaaaacaggaaggcaaaatgccgcaaaaaagggaataagggcgacacggaaatgttgaatactcatactcttcctttttcaatattattgaagcatttatcagggttattgtctcatgagcggatacatatttgaatgtatttagaaaaataaacaaataggggttccgcgcacatttccccgaaaagtgccacctg

SEQ ID NO: 17 - DNA, 17839 bp, artificial sequence
  plasmid BG282
acggtcctgcaggtaatacgactcactatagggataacttaaatttatattttttactttataatatataattgattatagaatccaaattagataggaggaccaggtaaatggagaataattttattgtcaacgaaaacgagaaaagggttttaaagcagatatttaacaactccaatatcagtagaactcaaatttccaagaatttagaactgaataaagcaacaatttcgaacattcttaacaatctaaagcataaaagtttggtaaatgaagttggtgaaggaaattctactaaaagtggtggaagaaaacctatacttctcgaaattaatcaaaagtatgggtattatataagcatggatttgacatatgattctgttgagttaatgtataactattttgatgctacaattctcaaacaagatagttatgaactgaatgataagaatgtaagtagcatattacagatactcaaatctaacataaatgttagcgaaaaatacgacacattatacggtttattagggataagtatatccatacatgggattgtagatgatgaacaaaacatcattaatctaccatttcacaagaatgaaaaaagaacgtttactgatgaacttaagtctttcactaatgtaccagtggttattgaaaatgaggcaaatttaagtgcattatacgagaaaagtttatacatcaattcgaatattaacaacttgatcacattgtctatacataaaggtataggagctggcatcataatcaataagaaactctatagaggtagtaatggagaagctggagaaataggaaagactcttgttttagagtctatcaataacaatgataacaagtactataaaatagaggatatttgtagtcaagacgctttgatacaaaagattaataacagattaggagttacacttacatttaccgaactaatacagtattataacgaaggaaatagtattgtagctcatgaaatcaaacagtttatcaacaaaatgactgtcttaatacacaatcttaatactcagtttaatccagatgcaatatacatcaattgtcccttgattaatgaacttcctaatattctaaacgaaatcaaagaacaattctcttgtttttcacaaggaagtcctatacaattgcatttaaccactaatgttaaacaagctacattattaggtggaacattagcaattatgcagaaaacccttaacataaacaatatccaaatgaatattaaatagttacagcagtctgagttataaaatagatatctcggaccgtctattcttccttatttgagtgggtaccaatgaaatctttcgagctaaatcgatttctggcccactcttttttattttttagtaagcgtttacaaaaaatgaacaatgtgctatattacctctaaagttagtttgtttattaaattaaccaactaaaatgtcgggatccaattaggaggaatctgcgatggaaaaaaaggaatttcgtgttttgataaaatactgttttctgaagggaaaaaatacggtggaagcaaaaacttggcttgataatgagtttccggactctgccccagggaaatcaacaataattgattggtatgcaaaattcaagcgtggtgaaatgagcacggaggacggtgaacgcagtggacgcccgaaagaggtggttaccgacgaaaacatcaaaaaaatccacaaaatgattttgaatgaccgtaaaatgaagttgatcgagatagcagaggccttaaagatatcaaaggaacgtgttggtcatatcattcatcaatatttggatatgcggaagctctgtgcaaaatgggtgccgcgcgagctcacatttgaccaaaaacaacaacgtgttgatgattctgagcggtgtttgcagctgttaactcgtaatacacccgagtttttccgtcgatatgtgacaatggatgaaacatggctccatcactacactcctgagtccaatcgacagtcggctgagtggacagcgaccggtgaaccgtctccgaagcgtggaaagactcaaaagtccgctggcaaagtaatggcctctgttttttgggatgcgcatggaataatttttatcgattatcttgagaagggaaaaaccatcaacagtgactattatatggcgttattggagcgtttgaaggtcgaaatcgcggcaaaacggccccacatgaagaagaaaaaagtgttgttccaccaagacaacgcaccgtgccacaagtcattgagaacgatggcaaaaattcatgaattgggcttcgaattgcttccccacccaccgtattctccagatctggcccccagcgactttttcttgttctcagacctcaaaaggatgctcgcagggaaaaaatttggctgcaatgaagaggtgatcgccgaaactgaggcctattttgaggcaaaaccgaaggagtactaccaaaatggtatcaaaaaattggaaggtcgttataatcgttgtatcgctcttgaagggaactatgttgaataagaattccttaattaaggagctcgataaaaataagaagcctgcatttgcaggcttcttatttttatggtcatagctgtttcctggcgcgccgccattatttttttgaacaattgacaattcatttcttattttttattaagtgatagtcaaaaggcataacagtgctgaatagaaagaaatttacagaaaagaaaattatagaatttagtatgattaattatactcatttatgaatgtttaattgaatacaaaaaaaaatacttgttatgtattcaattacgggttaaaatatagacaagttgaaaaatttaataaaaaaataagtcctcagctcttatatattaagctaccaacttagtatataagccaaaacttaaatgtgctaccaacacatcaagccgttagagaactctatctatagcaatatttcaaatgtaccgacatacaagagaaacattaactatatatattcaatttatgagattatcttaacagatataaatgtaaattgcaataagtaagatttagaagtttatagcctttgtgtattggaagcagtacgcaaaggcttttttatttgataaaaattagaagtatatttattttttcataattaatttatgaaaatgaaagggggtgagcaaagtgacagaggaaagcagtatcttatcaaataacaaggtattagcaatatcattattgactttagcagtaaacattatgacttttatagtgcttgtagctaagtagtacgaaagggggagctttaaaaagctccttggaatacatagaattcataaattaatttatgaaaagaagggcgtatatgaaaacttgtaaaaattgcaaagagtttattaaagatactgaaatatgcaaaatacattcgttgatgattcatgataaaacagtagcaacctattgcagtaaatacaatgagtcaagatgtttacataaagggaaagtccaatgtattaattgttcaaagatgaaccgatatggatggtgtgccataaaaatgagatgttttacagaggaagaacagaaaaaagaacgtacatgcattaaatattatgcaaggagctttaaaaaagctcatgtaaagaagagtaaaaagaaaaaataatttatttattaatttaatattgagagtgccgacacagtatgcactaaaaaatatatctgtggtgtagtgagccgatacaaaaggatagtcactcgcattttcataatacatcttatgttatgattatgtgtcggtgggacttcacgacgaaaacccacaataaaaaaagagttcggggtagggttaagcatagttgaggcaactaaacaatcaagctaggatatgcagtagcagaccgtaaggtcgttgtttaggtgtgttgtaatacatacgctattaagatgtaaaaatacggataccaatgaagggaaaagtataatttttggatgtagtttgtttgttcatctatgggcaaactacgtccaaagccgtttccaaatctgctaaaaagtatatcctttctaaaatcaaagtcaagtatgaaatcataaataaagtttaattttgaagttattatgatattatgtttttctattaaaataaattaagtatatagaatagtttaataatagtatatacttaatgtgataagtgtctgacagtgtcacagaaaggatgattgttatggattataagcggccggccagtgggcaagttgaaaaattcacaaaaatgtggtataatatctttgttcattagagcgataaacttgaatttgagagggaacttagatggtatttgaaaaaattgataaaaatagttggaacagaaaagagtattttgaccactactttgcaagtgtaccttgtacctacagcatgaccgttaaagtggatatcacacaaataaaggaaaagggaatgaaactatatcctgcaatgctttattatattgcaatgattgtaaaccgccattcagagtttaggacggcaatcaatcaagatggtgaattggggatatatgatgagatgataccaagctatacaatatttcacaatgatactgaaacattttccagcctttggactgagtgtaagtctgactttaaatcatttttagcagattatgaaagtgatacgcaacggtatggaaacaatcatagaatggaaggaaagccaaatgctccggaaaacatttttaatgtatctatgataccgtggtcaaccttcgatggctttaatctgaatttgcagaaaggatatgattatttgattcctatttttactatggggaaatattataaagaagataacaaaattatacttcctttggcaattcaagttcatcacgcagtatgtgacggatttcacatttgccgttttgtaaacgaattgcaggaattgataaatagttaacttcaggtttgtctgtaactaaaaacaagtatttaagcaaaaacatcgtagaaatacggtgttttttgttaccctaagtttaaacgagtgacggaattgtgagcggataacaattccacaggttggctgataagtccccggtctgtaccgttcgtataatgtatgctatacgaagttataggaggttataatgaacgagaaaaatataaaacacagtcaaaactttattacttcaaaacataatatagataaaataatgacaaatataagattaaatgaacatgataatatctttgaaatcggctcaggaaaagggcattttacccttgaattagtacagaggtgtaatttcgtaactgccattgaaatagaccataaattatgcaaaactacagaaaataaacttgttgatcacgataatttccaagttttaaacaaggatatattgcagtttaaatttcctaaaaaccaatcctataaaatatttggtaatataccttataacataagtacggatataatacgcaaaattgtttttgatagtatagctgatgagatttatttaatcgtggaatacgggtttgctaaaagattattaaatacaaaacgctcattggcattatttttaatggcagaagttgatatttctatattaagtatggttccaagagaatattttcatcctaaacctaaagtgaatagctcacttatcagattaaatagaaaaaaatcaagaatatcacacaaagataaacagaagtataattatttcgttatgaaatgggttaacaaagaatacaagaaaatatttacaaaaaatcaatttaacaattccttaaaacatgcaggaattgacgatttaaacaatattagctttgaacaattcttatctcttttcaatagctataaattatttaataagtaagttaagggatgcataaactgcatcccttaacttgtttttcgtgtacctattttttgtgaatcgattatgtcttttgcgcattcgtcgacaattgcatatattgataaaaataataatagtgggtataattaagttgttaggaggttagttagaatgagtagactcgataagtctaaagtgataaattccgcattagaactccttaatgaagttggaattgaaggtctaactaccaggaaattagctcagaaacttggagttgaacaaccaacattgtactggcatgtcaaaaacaaaagagcactcttagatgcattagcaatcgaaatgttagacagacatcatacacacttttgtccattagaaggtgaaagttggcaagactttttgaggaataacgcgaaaagtttcagatgtgctttactatcccatagagatggggctaaagttcacttaggaactagacctacagaaaagcagtatgagacacttgaaaatcagttggcatttctatgtcaacaaggattctcattagagaacgcattatatgctctttcagctgtaggtcatttcacgttaggttgtgttttggaagatcaagaacatcaagttgcaaaagaagagagagaaactcctactacagatagtatgccacctttattacgacaagctatagaactgtttgatcatcaaggagctgaacctgcgtttctctttggattggagttaataatttgcggactagagaaacagcttaagtgtgaaagtggatcttagttagcaccggtcagggtggtgaatgtgaaaccagtaacgttatacgatgtcgcagagtatgccggtgtctcttatcagaccgtttcccgcgtggtgaaccaggccagccacgtttctgcgaaaacgcgggaaaaagtggaagcggcgatggcggagctgaattacattcccaaccgcgtggcacaacaactggcgggcaaacagtcgttgctgattggcgttgccacctccagtctggccctgcacgcgccgtcgcaaattgtcgcggcgattaaatctcgcgccgatcaactgggtgccagcgtggtggtgtcgatggtagaacgaagcggcgtcgaagcctgtaaagcggcggtgcacaatcttctcgcgcaacgcgtcagtgggctgatcattaactatccgctggatgaccaggatgccattgctgtggaagctgcctgcactaatgttccggcgttatttcttgatgtctctgaccagacacccatcaacagtattattttctcccatgaagacggtacgcgactgggcgtggagcatctggtcgcattgggtcaccagcaaatcgcgctgttagcgggcccattaagttctgtctcggcgcgtctgcgtctggctggctggcataaatatctcactcgcaatcaaattcagccgatagcggaacgggaaggcgactggagtgccatgtccggttttcaacaaaccatgcaaatgctgaatgagggcatcgttcccactgcgatgctggttgccaacgatcagatggcgctgggcgcaatgcgcgccattaccgagtccgggctgcgcgttggtgcggacatctcggtagtgggatacgacgataccgaagacagctcatgttatatcccgccgttaaccaccatcaaacaggattttcgcctgctggggcaaaccagcgtggaccgcttgctgcaactctctcagggccaggcggtgaagggcaatcagctgttgcccgtctcactggtgaaaagaaaaaccaccctggcgcccaatacgcaaaccgcctctccccgcgcgttggccgattcattaatgcagctggcacgacaggtttcccgactggaaagcgggcagtgagcgcaacgcaattaatgtaagttagctcactcattaggcaccgggatctcgaccgatgcccttgagagccttcaacccagtcagctccttccggtgggcgcggggcatgactagcatgatcgtgctcctgtcgttgaggacccggctaggctggcggggttgccttactggttagcagaatgaatcaccgatacgcgataacttcgtataatgtatgctatacgaacggtagctcagctagcacccagttaacttcaggtttgtctgtaactaaaaacaagtatttaagcaaaaacatcgtagaaatacggtgttttttgttaccctaagtttaaacgagtgactcgagctatctacccaattcttgatgagctttacctaaatgtcctgctgctaatgctcctaataaagacaactctcctgctaaaactgctgcacctactatttccgcaaattttaacgctttattatcgccataacatccaagcatttcaagacattctttctgtgtttctactctagttcctcctccaactgtacctataggaacatcaggtaatgtaaccgaaaagtataaaccgtcatcttctacttcagccattgtaatccctaatgatccttcaactatatgagcttcatcttgacctgtcgctaaaaatatagctccaattatattcgcatagtgagcattaaatcccatactattggatattgcagatcctatatagttctttagtctattgacttcagctattgcttgtgatgtagtcttgagatatttgttaacttctttctcagtgagaaatacttctgcaactatactcttacctcttccattgataagattcataccacttggtttcttatctacacatgcatttcctgatactgctacagtcttaacgaatattccttcctttttgagttcaccttcgataaaattacacgctttttctgttgctatagtcaccatattcatacccatagcatctccagttttgaaaacaaacctaggatacaaatttcgtccaactatgagtataggttcgatttttatcagtttcccatgtcttgttgtagattcagcaacttccttgattctttcgaagttctctctaatccaatctctaactttgatagcatcaacaacacttttggtttttaaacaaggtgctcttgtcatcttatcatcaattaccctaactgttgctcctccacatttggtgataatactacaccctctattaactgaagctactaatgctccttcagttgtagctaagggaatataaaactcacctttagcatactctccatttatctttagtggaccagcaaaacctaatgggatttgaattgcaccaatcatattctcaatatttttcttcattgccatttcttcatctatgctatagttacatatatgtttaaattcaatgccaactttcttctctataaattttctcctgatttcagtagcaattttgcttccaaacatcttatccaactgataaggtttgatctcaccatttaacatcttttcgagtatgtcattgtagttctccattgattcctcctgactattctgctactttttgacttcgagactttgtatccaagtagcgactgctccattctcttctagtgtctgagctatagtttgagcggtctttttattatcggttaacgcaatcatacatccacctctacctccacctgttaacttcgcacctaatgctccatgttccaacgatagtgccactaatctgtccaacatatcgttagacacactcagctgttgtaactgctcttgtgcaagagtcatcaactgaccaagtttctgcttatcatcttggagaatagcttgtttcgcttctttcgtgaaggaacctaactgcttcattgtctcagcaattgcagtgggattattctgtgcgagttgagctatatctttaactgcttctctcgtttgacccttaattccagtatcagcgactactaagtaagcattggacagattcatggagaagtgagttggaggaaaacctctggtgaaaaacaacggatctgcaccacttgtagctgctgcatcaattcctgaaggatttccatgtgcgattttctcacttagactaaccagttcaaagagttcctgatacgtataagcgtagtcgaaatagtcgaataatgatctcacaatcgctactgctgtagctgcactagatcccattcctctttcagcaggaatggtacttgtaagggttaaggttcccttaaacgtgtcctctttcagaaaatggagggtttgttgtaccacctcctttatgttcgctaattcctgtggtacatcctctagtaaaccggtaaagtatgcacaatcgatttgcattgtcttagcaagagtgaatactgctgtgatttctgtcgcttgaaaagggaaagctattgcaggttcaccgtatacaacagcatgttcacccatgagtattattttgccagttgcttgacctaatccctgttttttgatgttcataatagtaagatctcctcagcgcctctaattcagtctctcaattaccatagcgattccttgtccacctcctatacataacgtcgctaatccaagggttttatctctagcttgcatagcatgtaacaaggttactaggattcttgcacctgaagctcctattggatgacctaacgcaattgcacctccatttacattgactttctctgaatcgaagcctaagttcttacctactgcgagaaattgtgcagcaaatgcctcatttgcttcgatgagatcaatgtctgccagttgtaatccagctagttggagagctttctgtgtagcaggaacaggtcccattcccattaaagcaggcggaactccaccactagcatagctcttaatccttgctaaaggagtcaaacctgctgctaaagctgcactctcttccataatcaccaatgctgctgctccatcatttatccctgatgcatttccagctgtaactgtacctgctttatcaaacgctggtcttaatgctcctaaagcttctgctgtactattcgccttaggaaattcatcctgactgaatacgaaggtctttttacgagtaacgacattgactggaactatctcagcagtaaatgctcctgattctatagcagctgctgcttttctctgtgagtgtaatgcgagttcatcttgcatttctcgtgttatgccatattccttagcgacattttcagcagttatgcccatatgatacccatgtgttgcacacattaacccatctcttagtataacgtcatatacctgaccatcacctagtctatacccacttctagctttagcatccaataagtatggtgcaagagacatattttccattccaccagcaactatactctgagcttgacctgcttgaattgcttgagctgctaaagcgacagatttaagccctgatccacaaactttgttaaccgtaaagccgcaaactgtttctgctagaccacttttgagtaatgcttgtctagcagggttttgtcctaaaccagcttgaagaacattccccattattacttcgtcaacgtgttgtgagtctatttttgccctttctattgcagctttgatgacagtagctccaagatcgattgcacttgtagatgctaaacttccattaaaagagcctatagcagttctaactgcactcacgattacacaattcttcatattctacctcctaacaacttaattatactctatcaatgatagagtttcaaactctatcaatgatagagtgcctaggctcctgaaaatctcgataactcaacctcgctaacggattcactctatcattgatagagtttgaaactctatcattgatagagtataatatctttgttcattagagcgataaacttgaattttaggagggaacttagatgacgttaggaattgataaaatcaacttctatgtccccaaatattacgtggatatggcgaaattagcagaggcaagacaagttgatcccaacaagttcctcatcggtattggacagactgaaatggctgtttctcctgtcaatcaggacattgtaagtatgggtgcaaatgcagctaaggacataatcacagatgaggacaaaaagaaaatcggaatggtaatagtcgcaacagaatctgcagtagatgcagctaaagcagcagcagttcaaattcacaatttattagggattcaaccttttgcgagatgtttcgaaatgaaggaagcatgttatgctgcaactccagctatccaattggcaaaggactatctagctacaagacctaacgagaaagttttggtcatagctactgatactgctagatacggacttaactcaggaggtgaacctacacaaggtgcaggtgcagtagcaatggtcatatcccacaatcctagtatactcgcattaaacgaggatgcagttgcatatacggaagatgtgtacgacttttggagacctactggtcataagtaccctctagttgatggagctctttctaaggacgcttatatccgaagttttcaacagtcttggaatgagtatgcgaaaagacaaggcaaatccttagcagatttcgcaagtttatgcttccatgttcccttcactaaaatggggaaaaaagcgttagagtccatcatagataacgctgatgaaaccactcaagagagacttagatccggttatgaagatgctgtggactataaccgctatgttgggaacatttacacgggaagtttgtacctgtcactcatatccttgcttgagaatcgtgacttacaagcaggtgaaacgattggattgttctcgtatggaagtggtagtgtaggggagttttacagtgcgacgttagtagaaggctataaggaccatcttgatcaagctgcacataaagctctccttaataaccgtaccgaagttagtgtagatgcttacgagaccttctttaagaggtttgatgacgttgatttcgacgaacaacaagatgctgtacatgaagatcgtcatatcttctacctgagtaacatcgagaataacgtcagagagtaccatagaccagaatagtcggaattctagaggaggaatcaatgacagcagataacaattctatgccacatggagcagtttcaagttatgcgaaattagttcagaaccaaactccagaagacatactagaggaatttccagaaatcatacccttacaacaaagaccaaatacaagaagttcggaaacatctaatgatgaatcaggtgaaacttgtttttcaggacatgatgaagaacagatcaaactcatgaacgagaattgtattgttcttgattgggacgataatgctataggtgctggtactaaaaaggtttgtcacttaatggaaaatatcgaaaagggattgttacacagagcatttagtgtatttatctttaatgaacaaggagaattactacttcaacaaagagctacagaaaagataacgtttcctgatttatggaccaatacttgttgtagtcatcctctatgtatagatgatgagttaggacttaaaggcaaattagacgacaaaatcaaaggtgctataacagcagctgtaagaaagttagatcatgagttaggaatacctgaagatgagactaaaactagaggaaaattccattttcttaaccgtatccattatatggcaccttctaatgaaccttggggtgaacatgaaatcgattatatcttgttctacaaaatcaatgctaaggaaaatcttactgtgaatcccaatgtaaatgaagtaagagattttaagtgggttagtcctaatgatctgaaaaccatgtttgcagatccttcctataaatttacaccttggtttaagattatatgcgagaattatctctttaattggtgggaacaattggatgatttgagtgaagttgagaatgacagacaaatacatcgaatgttatagtatatatgtaaggaggattttgatgttaagtggtaaagctagagcacatacgaatatagcactgattaagtactggggtaaagcaaatgaagagtatattttacccatgaactctagtttaagtttaacacttgatgcgttttacactgaaactacagtcatatttgatgcacattactcagaagatgttttcatcttagacggtatacttcagaacgagaaacagactaaaaaggttaaggagtttcttaatttagttcgacaacaagctgattgtacatggtttgcaaaagttgaaagccaaaactttgtacctacagcagctggtttagcatctagtgcatcaggtttagctgcattagcaggagcatgtaatgttgcattaggattgaatttgtccgctaaggatttgtctaggttagctagaagaggtagtggtagtgcatgtagatctatatttggtggattcgctcaatggaacaaaggtcatagtgatgaaaccagttttgcagagaatatacctgcaaataattgggagaatgaattggcaatgttgtttatcttgataaatgatggagaaaaagatgtgagtagtagagatggaatgaaaagaacagtcgaaacaagtagcttttatcaaggatggttagacaatgtcgaaaaggatttgagtcaagttcatgaagctatcaagaccaaagattttccaagattaggggaaataatcgaagcaaatggattacgtatgcatggaactacattaggtgctgtaccaccttttacgtattggtctccaggatcattacaggctatggcattagtcagacaagctagagctaaagggataccatgttatttcacaatggatgctggacctaatgtaaaagttcttgtcgaaaagaaaaacttagaggctcttaaaacctttctaagtgaacacttttccaaggaacaattagttcctgcttttgctggaccaggaatcgaattgtttgaaaccaaagggatggataaatagaggaggtatgtaaaaatgatagaagttacaacaccaggtaaattgtttatagcaggtgaatatgcagtagttgaaccaggtcatcctgcaattatagtagctgttgatcaatttgtcactgttactgttgaagaaacaactgatgaaggttctattcaaagtgctcaatattcgagtctccctataagatggactagaagaaatggtgaacttgtactagacatcagggaaaatccatttcactacgtattagctgcaatacatctaaccgaaaagtatgcacaagaacagaataaggaactctccttttatcaccttaaagttacgagtgaattggattcttcgaatggaagaaagtatggtttaggatcttcaggtgctgtaacagtaggaacagtaaaagcgcttaatatattttatgacttaggacttgagaatgaagagatctttaaactatcagctttagcacatttagcagtacaaggaaatggaagttgtggagatattgctgcaagttgttatggaggatggattgctttcagtacgtttgatcatgattgggtcaatcaaaaggttgcaacagagacgttaaccgatttgttagcaatggattggcctgaactcatgatttttcccttgaaagttcccaaacaacttcgattattaataggatggactggtagtccagcatctacatccgatctagttgatagagtgcatcaaagtaaggaagagaaacaagcagcttatgaacagtttcttatgaaatcgagattatgtgttgagactatgataaacggattcaataccggtaaaattagcgtcatccaaaaacagatcaccaaaaatagacagcttttagcagaacttagtagtttaactggtgttgttatagagacagaagctctcaagaacttatgtgatttagctgagagttatacaggagcagctaaaagtagtggtgctggaggtggagattgtggtattgtcatatttagacagaaaagtggtatactccctttaatgactgcatgggaaaaagatgggattactcctttacctttgcatgtttacacatatggacaaaaggaatgtaaggaaaaacatgagtcaaaaaggtagcccgggaacatgtgagcaaaaggccagaaacgagtgactcgagaacatgtgagcaataaaaataagaagcctgcatttgcaggcttcttatttttatagaccggggacttatcagccaacctgtaggccagcaaaaggccaggaaccgtaaaaaggccgcgttgctggcgtttttccataggctccgcccccctgacgagcatcacaaaaatcgacgctcaagtcagaggtggcgaaacccgacaggactataaagataccaggcgtttccccctggaagctccctcgtgcgctctcctgttccgaccctgccgcttaccggatacctgtccgcctttctcccttcgggaagcgtggcgctttctcatagctcacgctgtaggtatctcagttcggtgtaggtcgttcgctccaagctgggctgtgtgcacgaaccccccgttcagcccgaccgctgcgccttatccggtaactatcgtcttgagtccaacccggtaagacacgacttatcgccactggcagcagccactggtaacaggattagcagagcgaggtatgtaggcggtgctacagagttcttgaagtggtggcctaactacggctacactagaagaacagtatttggtatctgcgctctgctgaagccagttaccttcggaaaaagagttggtagctcttgatccggcaaacaaaccaccgctggtagcggtggtttttttgtttgcaagcagcagattacgcgcagaaaaaaaggatctcaagaagatcctttgatcttttctacggggtctgacgctcagtggaacgaaaactcacgttaagggattttggtcatgagattatcaaaaaggatcttcacctagatccttttaaattaaaaatgaagttttaaatcaatctaaagtatatatgagtaaacttggtctgacagttaccaatgcttaatcagtgaggcacctatctcagcgatctgtctatttcgttcatccatagttgcctgactccccgtcgtgtagataactacgatacgggagggcttaccatctggccccagtgctgcaatgataccgcgagacccacgctcaccggctccagatttatcagcaataaaccagccagccggaagggccgagcgcagaagtggtcctgcaactttatccgcctccatccagtctattaattgttgccgggaagctagagtaagtagttcgccagttaatagtttgcgcaacgttgttgccattgctacaggcatcgtggtgtcacgctcgtcgtttggtatggcttcattcagctccggttcccaacgatcaaggcgagttacatgatcccccatgttgtgcaaaaaagcggttagctccttcggtcctccgatcgttgtcagaagtaagttggccgcagtgttatcactcatggttatggcagcactgcataattctcttactgtcatgccatccgtaagatgcttttctgtgactggtgagtactcaaccaagtcattctgagaatagtgtatgcggcgaccgagttgctcttgcccggcgtcaatacgggataataccgcgccacatagcagaactttaaaagtgctcatcattggaaaacgttcttcggggcgaaaactctcaaggatcttaccgctgttgagatccagttcgatgtaacccactcgtgcacccaactgatcttcagcatcttttactttcaccagcgtttctgggtgagcaaaaacaggaaggcaaaatgccgcaaaaaagggaataagggcgacacggaaatgttgaatactcatactcttcctttttcaatattattgaagcatttatcagggttattgtctcatgagcggatacatatttgaatgtatttagaaaaataaacaaataggggttccgcgcacatttccccgaaaagtgccacctg

SEQ ID NO: 18 - DNA, 17521 bp, artificial sequence
  plasmid BG281
acggtcctgcaggtaatacgactcactatagggataacttaaatttatattttttactttataatatataattgattatagaatccaaattagataggaggaccaggtaaatggagaataattttattgtcaacgaaaacgagaaaagggttttaaagcagatatttaacaactccaatatcagtagaactcaaatttccaagaatttagaactgaataaagcaacaatttcgaacattcttaacaatctaaagcataaaagtttggtaaatgaagttggtgaaggaaattctactaaaagtggtggaagaaaacctatacttctcgaaattaatcaaaagtatgggtattatataagcatggatttgacatatgattctgttgagttaatgtataactattttgatgctacaattctcaaacaagatagttatgaactgaatgataagaatgtaagtagcatattacagatactcaaatctaacataaatgttagcgaaaaatacgacacattatacggtttattagggataagtatatccatacatgggattgtagatgatgaacaaaacatcattaatctaccatttcacaagaatgaaaaaagaacgtttactgatgaacttaagtctttcactaatgtaccagtggttattgaaaatgaggcaaatttaagtgcattatacgagaaaagtttatacatcaattcgaatattaacaacttgatcacattgtctatacataaaggtataggagctggcatcataatcaataagaaactctatagaggtagtaatggagaagctggagaaataggaaagactcttgttttagagtctatcaataacaatgataacaagtactataaaatagaggatatttgtagtcaagacgctttgatacaaaagattaataacagattaggagttacacttacatttaccgaactaatacagtattataacgaaggaaatagtattgtagctcatgaaatcaaacagtttatcaacaaaatgactgtcttaatacacaatcttaatactcagtttaatccagatgcaatatacatcaattgtcccttgattaatgaacttcctaatattctaaacgaaatcaaagaacaattctcttgtttttcacaaggaagtcctatacaattgcatttaaccactaatgttaaacaagctacattattaggtggaacattagcaattatgcagaaaacccttaacataaacaatatccaaatgaatattaaatagttacagcagtctgagttataaaatagatatctcggaccgtctattcttccttatttgagtgggtaccaatgaaatctttcgagctaaatcgatttctggcccactcttttttattttttagtaagcgtttacaaaaaatgaacaatgtgctatattacctctaaagttagtttgtttattaaattaaccaactaaaatgtcgggatccaattaggaggaatctgcgatggaaaaaaaggaatttcgtgttttgataaaatactgttttctgaagggaaaaaatacggtggaagcaaaaacttggcttgataatgagtttccggactctgccccagggaaatcaacaataattgattggtatgcaaaattcaagcgtggtgaaatgagcacggaggacggtgaacgcagtggacgcccgaaagaggtggttaccgacgaaaacatcaaaaaaatccacaaaatgattttgaatgaccgtaaaatgaagttgatcgagatagcagaggccttaaagatatcaaaggaacgtgttggtcatatcattcatcaatatttggatatgcggaagctctgtgcaaaatgggtgccgcgcgagctcacatttgaccaaaaacaacaacgtgttgatgattctgagcggtgtttgcagctgttaactcgtaatacacccgagtttttccgtcgatatgtgacaatggatgaaacatggctccatcactacactcctgagtccaatcgacagtcggctgagtggacagcgaccggtgaaccgtctccgaagcgtggaaagactcaaaagtccgctggcaaagtaatggcctctgttttttgggatgcgcatggaataatttttatcgattatcttgagaagggaaaaaccatcaacagtgactattatatggcgttattggagcgtttgaaggtcgaaatcgcggcaaaacggccccacatgaagaagaaaaaagtgttgttccaccaagacaacgcaccgtgccacaagtcattgagaacgatggcaaaaattcatgaattgggcttcgaattgcttccccacccaccgtattctccagatctggcccccagcgactttttcttgttctcagacctcaaaaggatgctcgcagggaaaaaatttggctgcaatgaagaggtgatcgccgaaactgaggcctattttgaggcaaaaccgaaggagtactaccaaaatggtatcaaaaaattggaaggtcgttataatcgttgtatcgctcttgaagggaactatgttgaataagaattccttaattaaggagctcgataaaaataagaagcctgcatttgcaggcttcttatttttatggtcatagctgtttcctggcgcgccgccattatttttttgaacaattgacaattcatttcttattttttattaagtgatagtcaaaaggcataacagtgctgaatagaaagaaatttacagaaaagaaaattatagaatttagtatgattaattatactcatttatgaatgtttaattgaatacaaaaaaaaatacttgttatgtattcaattacgggttaaaatatagacaagttgaaaaatttaataaaaaaataagtcctcagctcttatatattaagctaccaacttagtatataagccaaaacttaaatgtgctaccaacacatcaagccgttagagaactctatctatagcaatatttcaaatgtaccgacatacaagagaaacattaactatatatattcaatttatgagattatcttaacagatataaatgtaaattgcaataagtaagatttagaagtttatagcctttgtgtattggaagcagtacgcaaaggcttttttatttgataaaaattagaagtatatttattttttcataattaatttatgaaaatgaaagggggtgagcaaagtgacagaggaaagcagtatcttatcaaataacaaggtattagcaatatcattattgactttagcagtaaacattatgacttttatagtgcttgtagctaagtagtacgaaagggggagctttaaaaagctccttggaatacatagaattcataaattaatttatgaaaagaagggcgtatatgaaaacttgtaaaaattgcaaagagtttattaaagatactgaaatatgcaaaatacattcgttgatgattcatgataaaacagtagcaacctattgcagtaaatacaatgagtcaagatgtttacataaagggaaagtccaatgtattaattgttcaaagatgaaccgatatggatggtgtgccataaaaatgagatgttttacagaggaagaacagaaaaaagaacgtacatgcattaaatattatgcaaggagctttaaaaaagctcatgtaaagaagagtaaaaagaaaaaataatttatttattaatttaatattgagagtgccgacacagtatgcactaaaaaatatatctgtggtgtagtgagccgatacaaaaggatagtcactcgcattttcataatacatcttatgttatgattatgtgtcggtgggacttcacgacgaaaacccacaataaaaaaagagttcggggtagggttaagcatagttgaggcaactaaacaatcaagctaggatatgcagtagcagaccgtaaggtcgttgtttaggtgtgttgtaatacatacgctattaagatgtaaaaatacggataccaatgaagggaaaagtataatttttggatgtagtttgtttgttcatctatgggcaaactacgtccaaagccgtttccaaatctgctaaaaagtatatcctttctaaaatcaaagtcaagtatgaaatcataaataaagtttaattttgaagttattatgatattatgtttttctattaaaataaattaagtatatagaatagtttaataatagtatatacttaatgtgataagtgtctgacagtgtcacagaaaggatgattgttatggattataagcggccggccagtgggcaagttgaaaaattcacaaaaatgtggtataatatctttgttcattagagcgataaacttgaatttgagagggaacttagatggtatttgaaaaaattgataaaaatagttggaacagaaaagagtattttgaccactactttgcaagtgtaccttgtacctacagcatgaccgttaaagtggatatcacacaaataaaggaaaagggaatgaaactatatcctgcaatgctttattatattgcaatgattgtaaaccgccattcagagtttaggacggcaatcaatcaagatggtgaattggggatatatgatgagatgataccaagctatacaatatttcacaatgatactgaaacattttccagcctttggactgagtgtaagtctgactttaaatcatttttagcagattatgaaagtgatacgcaacggtatggaaacaatcatagaatggaaggaaagccaaatgctccggaaaacatttttaatgtatctatgataccgtggtcaaccttcgatggctttaatctgaatttgcagaaaggatatgattatttgattcctatttttactatggggaaatattataaagaagataacaaaattatacttcctttggcaattcaagttcatcacgcagtatgtgacggatttcacatttgccgttttgtaaacgaattgcaggaattgataaatagttaacttcaggtttgtctgtaactaaaaacaagtatttaagcaaaaacatcgtagaaatacggtgttttttgttaccctaagtttaaacgagtgacggaattgtgagcggataacaattccacaggttggctgataagtccccggtctgtaccgttcgtataatgtatgctatacgaagttataggaggttataatgaacgagaaaaatataaaacacagtcaaaactttattacttcaaaacataatatagataaaataatgacaaatataagattaaatgaacatgataatatctttgaaatcggctcaggaaaagggcattttacccttgaattagtacagaggtgtaatttcgtaactgccattgaaatagaccataaattatgcaaaactacagaaaataaacttgttgatcacgataatttccaagttttaaacaaggatatattgcagtttaaatttcctaaaaaccaatcctataaaatatttggtaatataccttataacataagtacggatataatacgcaaaattgtttttgatagtatagctgatgagatttatttaatcgtggaatacgggtttgctaaaagattattaaatacaaaacgctcattggcattatttttaatggcagaagttgatatttctatattaagtatggttccaagagaatattttcatcctaaacctaaagtgaatagctcacttatcagattaaatagaaaaaaatcaagaatatcacacaaagataaacagaagtataattatttcgttatgaaatgggttaacaaagaatacaagaaaatatttacaaaaaatcaatttaacaattccttaaaacatgcaggaattgacgatttaaacaatattagctttgaacaattcttatctcttttcaatagctataaattatttaataagtaagttaagggatgcataaactgcatcccttaacttgtttttcgtgtacctattttttgtgaatcgattatgtcttttgcgcattcgtcgacaattgcatatattgataaaaataataatagtgggtataattaagttgttaggaggttagttagaatgagtagactcgataagtctaaagtgataaattccgcattagaactccttaatgaagttggaattgaaggtctaactaccaggaaattagctcagaaacttggagttgaacaaccaacattgtactggcatgtcaaaaacaaaagagcactcttagatgcattagcaatcgaaatgttagacagacatcatacacacttttgtccattagaaggtgaaagttggcaagactttttgaggaataacgcgaaaagtttcagatgtgctttactatcccatagagatggggctaaagttcacttaggaactagacctacagaaaagcagtatgagacacttgaaaatcagttggcatttctatgtcaacaaggattctcattagagaacgcattatatgctctttcagctgtaggtcatttcacgttaggttgtgttttggaagatcaagaacatcaagttgcaaaagaagagagagaaactcctactacagatagtatgccacctttattacgacaagctatagaactgtttgatcatcaaggagctgaacctgcgtttctctttggattggagttaataatttgcggactagagaaacagcttaagtgtgaaagtggatcttagttagcaccggtcagggtggtgaatgtgaaaccagtaacgttatacgatgtcgcagagtatgccggtgtctcttatcagaccgtttcccgcgtggtgaaccaggccagccacgtttctgcgaaaacgcgggaaaaagtggaagcggcgatggcggagctgaattacattcccaaccgcgtggcacaacaactggcgggcaaacagtcgttgctgattggcgttgccacctccagtctggccctgcacgcgccgtcgcaaattgtcgcggcgattaaatctcgcgccgatcaactgggtgccagcgtggtggtgtcgatggtagaacgaagcggcgtcgaagcctgtaaagcggcggtgcacaatcttctcgcgcaacgcgtcagtgggctgatcattaactatccgctggatgaccaggatgccattgctgtggaagctgcctgcactaatgttccggcgttatttcttgatgtctctgaccagacacccatcaacagtattattttctcccatgaagacggtacgcgactgggcgtggagcatctggtcgcattgggtcaccagcaaatcgcgctgttagcgggcccattaagttctgtctcggcgcgtctgcgtctggctggctggcataaatatctcactcgcaatcaaattcagccgatagcggaacgggaaggcgactggagtgccatgtccggttttcaacaaaccatgcaaatgctgaatgagggcatcgttcccactgcgatgctggttgccaacgatcagatggcgctgggcgcaatgcgcgccattaccgagtccgggctgcgcgttggtgcggacatctcggtagtgggatacgacgataccgaagacagctcatgttatatcccgccgttaaccaccatcaaacaggattttcgcctgctggggcaaaccagcgtggaccgcttgctgcaactctctcagggccaggcggtgaagggcaatcagctgttgcccgtctcactggtgaaaagaaaaaccaccctggcgcccaatacgcaaaccgcctctccccgcgcgttggccgattcattaatgcagctggcacgacaggtttcccgactggaaagcgggcagtgagcgcaacgcaattaatgtaagttagctcactcattaggcaccgggatctcgaccgatgcccttgagagccttcaacccagtcagctccttccggtgggcgcggggcatgactagcatgatcgtgctcctgtcgttgaggacccggctaggctggcggggttgccttactggttagcagaatgaatcaccgatacgcgataacttcgtataatgtatgctatacgaacggtagctcagctagcacccagttaacttcaggtttgtctgtaactaaaaacaagtatttaagcaaaaacatcgtagaaatacggtgttttttgttaccctaagtttaaacgagtgactcgagctatctacccaattcttgatgagctttacctaaatgtcctgctgctaatgctcctaataaagacaactctcctgctaaaactgctgcacctactatttccgcaaattttaacgctttattatcgccataacatccaagcatttcaagacattctttctgtgtttctactctagttcctcctccaactgtacctataggaacatcaggtaatgtaaccgaaaagtataaaccgtcatcttctacttcagccattgtaatccctaatgatccttcaactatatgagcttcatcttgacctgtcgctaaaaatatagctccaattatattcgcatagtgagcattaaatcccatactattggatattgcagatcctatatagttctttagtctattgacttcagctattgcttgtgatgtagtcttgagatatttgttaacttctttctcagtgagaaatacttctgcaactatactcttacctcttccattgataagattcataccacttggtttcttatctacacatgcatttcctgatactgctacagtcttaacgaatattccttcctttttgagttcaccttcgataaaattacacgctttttctgttgctatagtcaccatattcatacccatagcatctccagttttgaaaacaaacctaggatacaaatttcgtccaactatgagtataggttcgatttttatcagtttcccatgtcttgttgtagattcagcaacttccttgattctttcgaagttctctctaatccaatctctaactttgatagcatcaacaacacttttggtttttaaacaaggtgctcttgtcatcttatcatcaattaccctaactgttgctcctccacatttggtgataatactacaccctctattaactgaagctactaatgctccttcagttgtagctaagggaatataaaactcacctttagcatactctccatttatctttagtggaccagcaaaacctaatgggatttgaattgcaccaatcatattctcaatatttttcttcattgccatttcttcatctatgctatagttacatatatgtttaaattcaatgccaactttcttctctataaattttctcctgatttcagtagcaattttgcttccaaacatcttatccaactgataaggtttgatctcaccatttaacatcttttcgagtatgtcattgtagttctccattgattcctcctgactattctgctactttttgacttcgagactttgtatccaagtagcgactgctccattctcttctagtgtctgagctatagtttgagcggtctttttattatcggttaacgcaatcatacatccacctctacctccacctgttaacttcgcacctaatgctccatgttccaacgatagtgccactaatctgtccaacatatcgttagacacactcagctgttgtaactgctcttgtgcaagagtcatcaactgaccaagtttctgcttatcatcttggagaatagcttgtttcgcttctttcgtgaaggaacctaactgcttcattgtctcagcaattgcagtgggattattctgtgcgagttgagctatatctttaactgcttctctcgtttgacccttaattccagtatcagcgactactaagtaagcattggacagattcatggagaagtgagttggaggaaaacctctggtgaaaaacaacggatctgcaccacttgtagctgctgcatcaattcctgaaggatttccatgtgcgattttctcacttagactaaccagttcaaagagttcctgatacgtataagcgtagtcgaaatagtcgaataatgatctcacaatcgctactgctgtagctgcactagatcccattcctctttcagcaggaatggtacttgtaagggttaaggttcccttaaacgtgtcctctttcagaaaatggagggtttgttgtaccacctcctttatgttcgctaattcctgtggtacatcctctagtaaaccggtaaagtatgcacaatcgatttgcattgtcttagcaagagtgaatactgctgtgatttctgtcgcttgaaaagggaaagctattgcaggttcaccgtatacaacagcatgttcacccatgagtattattttgccagttgcttgacctaatccctgttttttgatgttcataatagtaagatctcctcagcgcctctaattcagtctctcaattaccatagcgattccttgtccacctcctatacataacgtcgctaatccaagggttttatctctagcttgcatagcatgtaacaaggttactaggattcttgcacctgaagctcctattggatgacctaacgcaattgcacctccatttacattgactttctctgaatcgaagcctaagttcttacctactgcgagaaattgtgcagcaaatgcctcatttgcttcgatgagatcaatgtctgccagttgtaatccagctagttggagagctttctgtgtagcaggaacaggtcccattcccattaaagcaggcggaactccaccactagcatagctcttaatccttgctaaaggagtcaaacctgctgctaaagctgcactctcttccataatcaccaatgctgctgctccatcatttatccctgatgcatttccagctgtaactgtacctgctttatcaaacgctggtcttaatgctcctaaagcttctgctgtactattcgccttaggaaattcatcctgactgaatacgaaggtctttttacgagtaacgacattgactggaactatctcagcagtaaatgctcctgattctatagcagctgctgcttttctctgtgagtgtaatgcgagttcatcttgcatttctcgtgttatgccatattccttagcgacattttcagcagttatgcccatatgatacccatgtgttgcacacattaacccatctcttagtataacgtcatatacctgaccatcacctagtctatacccacttctagctttagcatccaataagtatggtgcaagagacatattttccattccaccagcaactatactctgagcttgacctgcttgaattgcttgagctgctaaagcgacagatttaagccctgatccacaaactttgttaaccgtaaagccgcaaactgtttctgctagaccacttttgagtaatgcttgtctagcagggttttgtcctaaaccagcttgaagaacattccccattattacttcgtcaacgtgttgtgagtctatttttgccctttctattgcagctttgatgacagtagctccaagatcgattgcacttgtagatgctaaacttccattaaaagagcctatagcagttctaactgcactcacgattacacaattcttcatattctacctcctaacaacttaattatactctatcaatgatagagtttcaaactctatcaatgatagagtgcctaggctcctgaaaatctcgataactcaacctcgctaacggattcactctatcattgatagagtttgaaactctatcattgatagagtataatatctttgttcattagagcgataaacttgaattttaggagggaacttagatgacgttaggaattgataaaatcaacttctatgtccccaaatattacgtggatatggcgaaattagcagaggcaagacaagttgatcccaacaagttcctcatcggtattggacagactgaaatggctgtttctcctgtcaatcaggacattgtaagtatgggtgcaaatgcagctaaggacataatcacagatgaggacaaaaagaaaatcggaatggtaatagtcgcaacagaatctgcagtagatgcagctaaagcagcagcagttcaaattcacaatttattagggattcaaccttttgcgagatgtttcgaaatgaaggaagcatgttatgctgcaactccagctatccaattggcaaaggactatctagctacaagacctaacgagaaagttttggtcatagctactgatactgctagatacggacttaactcaggaggtgaacctacacaaggtgcaggtgcagtagcaatggtcatatcccacaatcctagtatactcgcattaaacgaggatgcagttgcatatacggaagatgtgtacgacttttggagacctactggtcataagtaccctctagttgatggagctctttctaaggacgcttatatccgaagttttcaacagtcttggaatgagtatgcgaaaagacaaggcaaatccttagcagatttcgcaagtttatgcttccatgttcccttcactaaaatggggaaaaaagcgttagagtccatcatagataacgctgatgaaaccactcaagagagacttagatccggttatgaagatgctgtggactataaccgctatgttgggaacatttacacgggaagtttgtacctgtcactcatatccttgcttgagaatcgtgacttacaagcaggtgaaacgattggattgttctcgtatggaagtggtagtgtaggggagttttacagtgcgacgttagtagaaggctataaggaccatcttgatcaagctgcacataaagctctccttaataaccgtaccgaagttagtgtagatgcttacgagaccttctttaagaggtttgatgacgttgatttcgacgaacaacaagatgctgtacatgaagatcgtcatatcttctacctgagtaacatcgagaataacgtcagagagtaccatagaccagaatagtcggaattctagaggaggaatcaatgcaaacggaacacgtcattttattgaatgcacagggagttcccacgggtacgctggaaaagtatgccgcacacacggcagacaccctcttacatctcgcgttctccagttggctgtttaatgccaaggggcaattattagttacccgccgcgcactgagcaaaaaagcatggcctggcgtgtggactaactcggtttgtgggcacccacaactgggagaaagcaacgaagacgcagtgatccgccgttgccgttatgagcttggcgtggaaattacgcctcctgaatctatctatcctgactttcgctatcgcgccaccgatccgaatggcattgtggaaaatgaagtgtgtccggtatttgccgcacgcaccaacagtgcgttacagatcaacgatgatgaagtgatggattatcaatggtgtgatttagcagatgtattacacggtattgatgccacgccgtgggcgttcagtccgtggatggtaatgcaggcagccaatagtgaagcaagaaaattgttgtctgctttcgcgcagcacaattaatatatatgtaaggaggattttgatgttaagtggtaaagctagagcacatacgaatatagcactgattaagtactggggtaaagcaaatgaagagtatattttacccatgaactctagtttaagtttaacacttgatgcgttttacactgaaactacagtcatatttgatgcacattactcagaagatgttttcatcttagacggtatacttcagaacgagaaacagactaaaaaggttaaggagtttcttaatttagttcgacaacaagctgattgtacatggtttgcaaaagttgaaagccaaaactttgtacctacagcagctggtttagcatctagtgcatcaggtttagctgcattagcaggagcatgtaatgttgcattaggattgaatttgtccgctaaggatttgtctaggttagctagaagaggtagtggtagtgcatgtagatctatatttggtggattcgctcaatggaacaaaggtcatagtgatgaaaccagttttgcagagaatatacctgcaaataattgggagaatgaattggcaatgttgtttatcttgataaatgatggagaaaaagatgtgagtagtagagatggaatgaaaagaacagtcgaaacaagtagcttttatcaaggatggttagacaatgtcgaaaaggatttgagtcaagttcatgaagctatcaagaccaaagattttccaagattaggggaaataatcgaagcaaatggattacgtatgcatggaactacattaggtgctgtaccaccttttacgtattggtctccaggatcattacaggctatggcattagtcagacaagctagagctaaagggataccatgttatttcacaatggatgctggacctaatgtaaaagttcttgtcgaaaagaaaaacttagaggctcttaaaacctttctaagtgaacacttttccaaggaacaattagttcctgcttttgctggaccaggaatcgaattgtttgaaaccaaagggatggataaatagaggaggtatgtaaaaatgatagaagttacaacaccaggtaaattgtttatagcaggtgaatatgcagtagttgaaccaggtcatcctgcaattatagtagctgttgatcaatttgtcactgttactgttgaagaaacaactgatgaaggttctattcaaagtgctcaatattcgagtctccctataagatggactagaagaaatggtgaacttgtactagacatcagggaaaatccatttcactacgtattagctgcaatacatctaaccgaaaagtatgcacaagaacagaataaggaactctccttttatcaccttaaagttacgagtgaattggattcttcgaatggaagaaagtatggtttaggatcttcaggtgctgtaacagtaggaacagtaaaagcgcttaatatattttatgacttaggacttgagaatgaagagatctttaaactatcagctttagcacatttagcagtacaaggaaatggaagttgtggagatattgctgcaagttgttatggaggatggattgctttcagtacgtttgatcatgattgggtcaatcaaaaggttgcaacagagacgttaaccgatttgttagcaatggattggcctgaactcatgatttttcccttgaaagttcccaaacaacttcgattattaataggatggactggtagtccagcatctacatccgatctagttgatagagtgcatcaaagtaaggaagagaaacaagcagcttatgaacagtttcttatgaaatcgagattatgtgttgagactatgataaacggattcaataccggtaaaattagcgtcatccaaaaacagatcaccaaaaatagacagcttttagcagaacttagtagtttaactggtgttgttatagagacagaagctctcaagaacttatgtgatttagctgagagttatacaggagcagctaaaagtagtggtgctggaggtggagattgtggtattgtcatatttagacagaaaagtggtatactccctttaatgactgcatgggaaaaagatgggattactcctttacctttgcatgtttacacatatggacaaaaggaatgtaaggaaaaacatgagtcaaaaaggtagcccgggaacatgtgagcaaaaggccagaaacgagtgactcgagaacatgtgagcaataaaaataagaagcctgcatttgcaggcttcttatttttatagaccggggacttatcagccaacctgtaggccagcaaaaggccaggaaccgtaaaaaggccgcgttgctggcgtttttccataggctccgcccccctgacgagcatcacaaaaatcgacgctcaagtcagaggtggcgaaacccgacaggactataaagataccaggcgtttccccctggaagctccctcgtgcgctctcctgttccgaccctgccgcttaccggatacctgtccgcctttctcccttcgggaagcgtggcgctttctcatagctcacgctgtaggtatctcagttcggtgtaggtcgttcgctccaagctgggctgtgtgcacgaaccccccgttcagcccgaccgctgcgccttatccggtaactatcgtcttgagtccaacccggtaagacacgacttatcgccactggcagcagccactggtaacaggattagcagagcgaggtatgtaggcggtgctacagagttcttgaagtggtggcctaactacggctacactagaagaacagtatttggtatctgcgctctgctgaagccagttaccttcggaaaaagagttggtagctcttgatccggcaaacaaaccaccgctggtagcggtggtttttttgtttgcaagcagcagattacgcgcagaaaaaaaggatctcaagaagatcctttgatcttttctacggggtctgacgctcagtggaacgaaaactcacgttaagggattttggtcatgagattatcaaaaaggatcttcacctagatccttttaaattaaaaatgaagttttaaatcaatctaaagtatatatgagtaaacttggtctgacagttaccaatgcttaatcagtgaggcacctatctcagcgatctgtctatttcgttcatccatagttgcctgactccccgtcgtgtagataactacgatacgggagggcttaccatctggccccagtgctgcaatgataccgcgagacccacgctcaccggctccagatttatcagcaataaaccagccagccggaagggccgagcgcagaagtggtcctgcaactttatccgcctccatccagtctattaattgttgccgggaagctagagtaagtagttcgccagttaatagtttgcgcaacgttgttgccattgctacaggcatcgtggtgtcacgctcgtcgtttggtatggcttcattcagctccggttcccaacgatcaaggcgagttacatgatcccccatgttgtgcaaaaaagcggttagctccttcggtcctccgatcgttgtcagaagtaagttggccgcagtgttatcactcatggttatggcagcactgcataattctcttactgtcatgccatccgtaagatgcttttctgtgactggtgagtactcaaccaagtcattctgagaatagtgtatgcggcgaccgagttgctcttgcccggcgtcaatacgggataataccgcgccacatagcagaactttaaaagtgctcatcattggaaaacgttcttcggggcgaaaactctcaaggatcttaccgctgttgagatccagttcgatgtaacccactcgtgcacccaactgatcttcagcatcttttactttcaccagcgtttctgggtgagcaaaaacaggaaggcaaaatgccgcaaaaaagggaataagggcgacacggaaatgttgaatactcatactcttcctttttcaatattattgaagcatttatcagggttattgtctcatgagcggatacatatttgaatgtatttagaaaaataaacaaataggggttccgcgcacatttccccgaaaagtgccacctg

SEQ ID NO: 19 - DNA, 12497 bp, artificial sequence
  plasmid BG287
acggtcctgcaggtaatacgactcactatagggataacttaaatttatattttttactttataatatataattgattatagaatccaaattagataggaggaccaggtaaatggagaataattttattgtcaacgaaaacgagaaaagggttttaaagcagatatttaacaactccaatatcagtagaactcaaatttccaagaatttagaactgaataaagcaacaatttcgaacattcttaacaatctaaagcataaaagtttggtaaatgaagttggtgaaggaaattctactaaaagtggtggaagaaaacctatacttctcgaaattaatcaaaagtatgggtattatataagcatggatttgacatatgattctgttgagttaatgtataactattttgatgctacaattctcaaacaagatagttatgaactgaatgataagaatgtaagtagcatattacagatactcaaatctaacataaatgttagcgaaaaatacgacacattatacggtttattagggataagtatatccatacatgggattgtagatgatgaacaaaacatcattaatctaccatttcacaagaatgaaaaaagaacgtttactgatgaacttaagtctttcactaatgtaccagtggttattgaaaatgaggcaaatttaagtgcattatacgagaaaagtttatacatcaattcgaatattaacaacttgatcacattgtctatacataaaggtataggagctggcatcataatcaataagaaactctatagaggtagtaatggagaagctggagaaataggaaagactcttgttttagagtctatcaataacaatgataacaagtactataaaatagaggatatttgtagtcaagacgctttgatacaaaagattaataacagattaggagttacacttacatttaccgaactaatacagtattataacgaaggaaatagtattgtagctcatgaaatcaaacagtttatcaacaaaatgactgtcttaatacacaatcttaatactcagtttaatccagatgcaatatacatcaattgtcccttgattaatgaacttcctaatattctaaacgaaatcaaagaacaattctcttgtttttcacaaggaagtcctatacaattgcatttaaccactaatgttaaacaagctacattattaggtggaacattagcaattatgcagaaaacccttaacataaacaatatccaaatgaatattaaatagttacagcagtctgagttataaaatagatatctcggaccgtctattcttccttatttgagtgggtaccaatgaaatctttcgagctaaatcgatttctggcccactcttttttattttttagtaagcgtttacaaaaaatgaacaatgtgctatattacctctaaagttagtttgtttattaaattaaccaactaaaatgtcgggatccaattaggaggaatctgcgatggaaaagaaggaatttagagttttaataaagtattgttttcttaaaggaaagaatacagtagaagctaagacttggttagataatgaatttccagattctgctcctggtaaaagtacaattatagattggtatgcaaaatttaaaagaggagaaatgtcaacagaagatggagaaagatctggtagaccaaaagaagttgtaactgatgaaaatataaagaagatacataaaatgatattaaatgatagaaagatgaagttaatagaaatagcagaagctttaaaaatatctaaagaaagagttggacatataatacatcaatatttagatatgagaaaattatgtgcaaaatgggttccaagagaattaacttttgatcaaaagcaaagaagagtagatgatagtaagagatgtttacaattattaacaagaaatactccagaatttttcagaagatatgtaacaatggatgaaacttggttacatcattatacacctgaaagtaatagacaatcagcagaatggacagctactggagaaccatcacctaaaagaggaaagactcaaaagagtgctggaaaggttatggcatcagtattttgggatgctcatggtataatatttatagattatttagaaaaaggaaaaacaataaattctgattattatatggcattattagaaagattaaaagttgaaatagcagctaaaagaccacatatgaagaagaaaaaagtattatttcatcaagataatgctccttgtcataagtcattaagaactatggcaaagatacatgaattaggttttgaattattaccacatccaccttattcaccagatttagctccttctgatttctttttatttagtgatttaaagagaatgttagcaggaaagaagtttggttgtaatgaagaagttatagcagaaacagaagcttattttgaagcaaaacctaaggaatattatcaaaatggaataaagaagttagaaggtagatataatagatgtatagcattagaaggaaattatgtagaataagaattccttaattaaggagctcgataaaaataagaagcctgcatttgcaggcttcttatttttatggtcatagctgtttcctggcgcgccgccattatttttttgaacaattgacaattcatttcttattttttattaagtgatagtcaaaaggcataacagtgctgaatagaaagaaatttacagaaaagaaaattatagaatttagtatgattaattatactcatttatgaatgtttaattgaatacaaaaaaaaatacttgttatgtattcaattacgggttaaaatatagacaagttgaaaaatttaataaaaaaataagtcctcagctcttatatattaagctaccaacttagtatataagccaaaacttaaatgtgctaccaacacatcaagccgttagagaactctatctatagcaatatttcaaatgtaccgacatacaagagaaacattaactatatatattcaatttatgagattatcttaacagatataaatgtaaattgcaataagtaagatttagaagtttatagcctttgtgtattggaagcagtacgcaaaggcttttttatttgataaaaattagaagtatatttattttttcataattaatttatgaaaatgaaagggggtgagcaaagtgacagaggaaagcagtatcttatcaaataacaaggtattagcaatatcattattgactttagcagtaaacattatgacttttatagtgcttgtagctaagtagtacgaaagggggagctttaaaaagctccttggaatacatagaattcataaattaatttatgaaaagaagggcgtatatgaaaacttgtaaaaattgcaaagagtttattaaagatactgaaatatgcaaaatacattcgttgatgattcatgataaaacagtagcaacctattgcagtaaatacaatgagtcaagatgtttacataaagggaaagtccaatgtattaattgttcaaagatgaaccgatatggatggtgtgccataaaaatgagatgttttacagaggaagaacagaaaaaagaacgtacatgcattaaatattatgcaaggagctttaaaaaagctcatgtaaagaagagtaaaaagaaaaaataatttatttattaatttaatattgagagtgccgacacagtatgcactaaaaaatatatctgtggtgtagtgagccgatacaaaaggatagtcactcgcattttcataatacatcttatgttatgattatgtgtcggtgggacttcacgacgaaaacccacaataaaaaaagagttcggggtagggttaagcatagttgaggcaactaaacaatcaagctaggatatgcagtagcagaccgtaaggtcgttgtttaggtgtgttgtaatacatacgctattaagatgtaaaaatacggataccaatgaagggaaaagtataatttttggatgtagtttgtttgttcatctatgggcaaactacgtccaaagccgtttccaaatctgctaaaaagtatatcctttctaaaatcaaagtcaagtatgaaatcataaataaagtttaattttgaagttattatgatattatgtttttctattaaaataaattaagtatatagaatagtttaataatagtatatacttaatgtgataagtgtctgacagtgtcacagaaaggatgattgttatggattataagcggccggccagtgggcaagttgaaaaattcacaaaaatgtggtataatatctttgttcattagagcgataaacttgaatttgagagggaacttagatggtatttgaaaaaattgataaaaatagttggaacagaaaagagtattttgaccactactttgcaagtgtaccttgtacctacagcatgaccgttaaagtggatatcacacaaataaaggaaaagggaatgaaactatatcctgcaatgctttattatattgcaatgattgtaaaccgccattcagagtttaggacggcaatcaatcaagatggtgaattggggatatatgatgagatgataccaagctatacaatatttcacaatgatactgaaacattttccagcctttggactgagtgtaagtctgactttaaatcatttttagcagattatgaaagtgatacgcaacggtatggaaacaatcatagaatggaaggaaagccaaatgctccggaaaacatttttaatgtatctatgataccgtggtcaaccttcgatggctttaatctgaatttgcagaaaggatatgattatttgattcctatttttactatggggaaatattataaagaagataacaaaattatacttcctttggcaattcaagttcatcacgcagtatgtgacggatttcacatttgccgttttgtaaacgaattgcaggaattgataaatagttaacttcaggtttgtctgtaactaaaaacaagtatttaagcaaaaacatcgtagaaatacggtgttttttgttaccctaagtttaaacgagtgacggaattgtgagcggataacaattccacaggttggctgataagtccccggtctgtaccgttcgtataatgtatgctatacgaagttataggaggttataatgaacgagaaaaatataaaacacagtcaaaactttattacttcaaaacataatatagataaaataatgacaaatataagattaaatgaacatgataatatctttgaaatcggctcaggaaaagggcattttacccttgaattagtacagaggtgtaatttcgtaactgccattgaaatagaccataaattatgcaaaactacagaaaataaacttgttgatcacgataatttccaagttttaaacaaggatatattgcagtttaaatttcctaaaaaccaatcctataaaatatttggtaatataccttataacataagtacggatataatacgcaaaattgtttttgatagtatagctgatgagatttatttaatcgtggaatacgggtttgctaaaagattattaaatacaaaacgctcattggcattatttttaatggcagaagttgatatttctatattaagtatggttccaagagaatattttcatcctaaacctaaagtgaatagctcacttatcagattaaatagaaaaaaatcaagaatatcacacaaagataaacagaagtataattatttcgttatgaaatgggttaacaaagaatacaagaaaatatttacaaaaaatcaatttaacaattccttaaaacatgcaggaattgacgatttaaacaatattagctttgaacaattcttatctcttttcaatagctataaattatttaataagtaagttaagggatgcataaactgcatcccttaacttgtttttcgtgtacctattttttgtgaatcgattatgtcttttgcgcattcgtcgacaattgcatatattgataaaaataataatagtgggtataattaagttgttaggaggttagttagaatgagtagactcgataagtctaaagtgataaattccgcattagaactccttaatgaagttggaattgaaggtctaactaccaggaaattagctcagaaacttggagttgaacaaccaacattgtactggcatgtcaaaaacaaaagagcactcttagatgcattagcaatcgaaatgttagacagacatcatacacacttttgtccattagaaggtgaaagttggcaagactttttgaggaataacgcgaaaagtttcagatgtgctttactatcccatagagatggggctaaagttcacttaggaactagacctacagaaaagcagtatgagacacttgaaaatcagttggcatttctatgtcaacaaggattctcattagagaacgcattatatgctctttcagctgtaggtcatttcacgttaggttgtgttttggaagatcaagaacatcaagttgcaaaagaagagagagaaactcctactacagatagtatgccacctttattacgacaagctatagaactgtttgatcatcaaggagctgaacctgcgtttctctttggattggagttaataatttgcggactagagaaacagcttaagtgtgaaagtggatcttagttagcaccggtcagggtggtgaatgtgaaaccagtaacgttatacgatgtcgcagagtatgccggtgtctcttatcagaccgtttcccgcgtggtgaaccaggccagccacgtttctgcgaaaacgcgggaaaaagtggaagcggcgatggcggagctgaattacattcccaaccgcgtggcacaacaactggcgggcaaacagtcgttgctgattggcgttgccacctccagtctggccctgcacgcgccgtcgcaaattgtcgcggcgattaaatctcgcgccgatcaactgggtgccagcgtggtggtgtcgatggtagaacgaagcggcgtcgaagcctgtaaagcggcggtgcacaatcttctcgcgcaacgcgtcagtgggctgatcattaactatccgctggatgaccaggatgccattgctgtggaagctgcctgcactaatgttccggcgttatttcttgatgtctctgaccagacacccatcaacagtattattttctcccatgaagacggtacgcgactgggcgtggagcatctggtcgcattgggtcaccagcaaatcgcgctgttagcgggcccattaagttctgtctcggcgcgtctgcgtctggctggctggcataaatatctcactcgcaatcaaattcagccgatagcggaacgggaaggcgactggagtgccatgtccggttttcaacaaaccatgcaaatgctgaatgagggcatcgttcccactgcgatgctggttgccaacgatcagatggcgctgggcgcaatgcgcgccattaccgagtccgggctgcgcgttggtgcggacatctcggtagtgggatacgacgataccgaagacagctcatgttatatcccgccgttaaccaccatcaaacaggattttcgcctgctggggcaaaccagcgtggaccgcttgctgcaactctctcagggccaggcggtgaagggcaatcagctgttgcccgtctcactggtgaaaagaaaaaccaccctggcgcccaatacgcaaaccgcctctccccgcgcgttggccgattcattaatgcagctggcacgacaggtttcccgactggaaagcgggcagtgagcgcaacgcaattaatgtaagttagctcactcattaggcaccgggatctcgaccgatgcccttgagagccttcaacccagtcagctccttccggtgggcgcggggcatgactagcatgatcgtgctcctgtcgttgaggacccggctaggctggcggggttgccttactggttagcagaatgaatcaccgatacgcgataacttcgtataatgtatgctatacgaacggtagctcagctagcacccgctcctgaaaatctcgataactcaacctcgctaacggattcactctatcattgatagagtttgaaactctatcattgatagagtataatatctttgttcattagagcgataaacttgaattttaggagggaacttagatgaatacaacgctgtttcgatggccggttcgcgtctactatgaagataccgatgccggtggtgtggtgtaccacgccagttacgtcgctttttatgaaagagcacgcacagagatgctgcgtcatcatcacttcagtcagcaggcgctgatggctgaacgcgttgcctttgtggtacgtaaaatgacggtggaatattacgcacctgcgcggctcgacgatatgctcgaaatacagactgaaataacatcaatgcgtggcacctctttggttttcacgcaacgtattgtcaacgccgagaatactttgctgaatgaagcagaggttctggttgtttgcgttgacccactcaaaatgaagcctcgtgcgcttcccaagtctattgtcgcggagtttaagcagtgactgacatgaatatccgttaggaggaacgtataaatatgaagaattgtgtaatcgtgagtgcagttagaactgctataggctcttttaatggaagtttagcatctacaagtgcaatcgatcttggagctactgtcatcaaagctgcaatagaaagggcaaaaatagactcacaacacgttgacgaagtaataatggggaatgttcttcaagctggtttaggacaaaaccctgctagacaagcattactcaaaagtggtctagcagaaacagtttgcggctttacggttaacaaagtttgtggatcagggcttaaatctgtcgctttagcagctcaagcaattcaagcaggtcaagctcagagtatagttgctggtggaatggaaaatatgtctcttgcaccatacttattggatgctaaagctagaagtgggtatagactaggtgatggtcaggtatatgacgttatactaagagatgggttaatgtgtgcaacacatgggtatcatatgggcataactgctgaaaatgtcgctaaggaatatggcataacacgagaaatgcaagatgaactcgcattacactcacagagaaaagcagcagctgctatagaatcaggagcatttactgctgagatagttccagtcaatgtcgttactcgtaaaaagaccttcgtattcagtcaggatgaatttcctaaggcgaatagtacagcagaagctttaggagcattaagaccagcgtttgataaagcaggtacagttacagctggaaatgcatcagggataaatgatggagcagcagcattggtgattatggaagagagtgcagctttagcagcaggtttgactcctttagcaaggattaagagctatgctagtggtggagttccgcctgctttaatgggaatgggacctgttcctgctacacagaaagctctccaactagctggattacaactggcagacattgatctcatcgaagcaaatgaggcatttgctgcacaatttctcgcagtaggtaagaacttaggcttcgattcagagaaagtcaatgtaaatggaggtgcaattgcgttaggtcatccaataggagcttcaggtgcaagaatcctagtaaccttgttacatgctatgcaagctagagataaaacccttggattagcgacgttatgtataggaggtggacaaggaatcgctatggtaattgagagactgaattagaggaggtgacttttatgttaaaggatgaagtaattaaacaaattagcacgccattaacttcgcctgcatttcctagaggaccctataaatttcataatcgtgagtattttaacattgtatatcgtacagatatggatgcacttcgtaaagttgtgccagagcctttagaaattgatgagcccttagtcaggtttgaaattatggcaatgcatgatacgagtggacttggttgttatacagaaagcggacaggctattcccgtaagctttaatggagttaagggagattatcttcatatgatgtatttagataatgagcctgcaattgcagtaggaagggaattaagtgcatatcctaaaaagctcgggtatccaaagctttttgtggattcagatactttagtaggaactttagactatggaaaacttagagttgcgacagctacaatggggtacaaacataaagccttagatgctaatgaagcaaaggatcaaatttgtcgccctaattatatgttgaaaataatacccaattatgatggaagccctagaatatgtgagcttataaatgcgaaaatcacagatgttaccgtacatgaagcttggacaggaccaactcgactgcagttatttgatcacgctatggcgccacttaatgatttgccagtaaaagagattgtttctagctctcacattcttgcagatataatattgcctagagctgaagttatatatgattatcttaagtaataaaaataagagttaccttaaatggtaactcttatttttttaatattgtttcatagtatttctttctaaacagccatggaaacgagtgactcgagaacatgtgagcaataaaaataagaagcctgcatttgcaggcttcttatttttatagaccggggacttatcagccaacctgtaggccagcaaaaggccaggaaccgtaaaaaggccgcgttgctggcgtttttccataggctccgcccccctgacgagcatcacaaaaatcgacgctcaagtcagaggtggcgaaacccgacaggactataaagataccaggcgtttccccctggaagctccctcgtgcgctctcctgttccgaccctgccgcttaccggatacctgtccgcctttctcccttcgggaagcgtggcgctttctcatagctcacgctgtaggtatctcagttcggtgtaggtcgttcgctccaagctgggctgtgtgcacgaaccccccgttcagcccgaccgctgcgccttatccggtaactatcgtcttgagtccaacccggtaagacacgacttatcgccactggcagcagccactggtaacaggattagcagagcgaggtatgtaggcggtgctacagagttcttgaagtggtggcctaactacggctacactagaagaacagtatttggtatctgcgctctgctgaagccagttaccttcggaaaaagagttggtagctcttgatccggcaaacaaaccaccgctggtagcggtggtttttttgtttgcaagcagcagattacgcgcagaaaaaaaggatctcaagaagatcctttgatcttttctacggggtctgacgctcagtggaacgaaaactcacgttaagggattttggtcatgagattatcaaaaaggatcttcacctagatccttttaaattaaaaatgaagttttaaatcaatctaaagtatatatgagtaaacttggtctgacagttaccaatgcttaatcagtgaggcacctatctcagcgatctgtctatttcgttcatccatagttgcctgactccccgtcgtgtagataactacgatacgggagggcttaccatctggccccagtgctgcaatgataccgcgagacccacgctcaccggctccagatttatcagcaataaaccagccagccggaagggccgagcgcagaagtggtcctgcaactttatccgcctccatccagtctattaattgttgccgggaagctagagtaagtagttcgccagttaatagtttgcgcaacgttgttgccattgctacaggcatcgtggtgtcacgctcgtcgtttggtatggcttcattcagctccggttcccaacgatcaaggcgagttacatgatcccccatgttgtgcaaaaaagcggttagctccttcggtcctccgatcgttgtcagaagtaagttggccgcagtgttatcactcatggttatggcagcactgcataattctcttactgtcatgccatccgtaagatgcttttctgtgactggtgagtactcaaccaagtcattctgagaatagtgtatgcggcgaccgagttgctcttgcccggcgtcaatacgggataataccgcgccacatagcagaactttaaaagtgctcatcattggaaaacgttcttcggggcgaaaactctcaaggatcttaccgctgttgagatccagttcgatgtaacccactcgtgcacccaactgatcttcagcatcttttactttcaccagcgtttctgggtgagcaaaaacaggaaggcaaaatgccgcaaaaaagggaataagggcgacacggaaatgttgaatactcatactcttcctttttcaatattattgaagcatttatcagggttattgtctcatgagcggatacatatttgaatgtatttagaaaaataaacaaataggggttccgcgcacatttccccgaaaagtgccacctg

SEQ ID NO: 20 - DNA, 12493 bp, artificial sequence
  plasmid BG288
acggtcctgcaggtaatacgactcactatagggataacttaaatttatattttttactttataatatataattgattatagaatccaaattagataggaggaccaggtaaatggagaataattttattgtcaacgaaaacgagaaaagggttttaaagcagatatttaacaactccaatatcagtagaactcaaatttccaagaatttagaactgaataaagcaacaatttcgaacattcttaacaatctaaagcataaaagtttggtaaatgaagttggtgaaggaaattctactaaaagtggtggaagaaaacctatacttctcgaaattaatcaaaagtatgggtattatataagcatggatttgacatatgattctgttgagttaatgtataactattttgatgctacaattctcaaacaagatagttatgaactgaatgataagaatgtaagtagcatattacagatactcaaatctaacataaatgttagcgaaaaatacgacacattatacggtttattagggataagtatatccatacatgggattgtagatgatgaacaaaacatcattaatctaccatttcacaagaatgaaaaaagaacgtttactgatgaacttaagtctttcactaatgtaccagtggttattgaaaatgaggcaaatttaagtgcattatacgagaaaagtttatacatcaattcgaatattaacaacttgatcacattgtctatacataaaggtataggagctggcatcataatcaataagaaactctatagaggtagtaatggagaagctggagaaataggaaagactcttgttttagagtctatcaataacaatgataacaagtactataaaatagaggatatttgtagtcaagacgctttgatacaaaagattaataacagattaggagttacacttacatttaccgaactaatacagtattataacgaaggaaatagtattgtagctcatgaaatcaaacagtttatcaacaaaatgactgtcttaatacacaatcttaatactcagtttaatccagatgcaatatacatcaattgtcccttgattaatgaacttcctaatattctaaacgaaatcaaagaacaattctcttgtttttcacaaggaagtcctatacaattgcatttaaccactaatgttaaacaagctacattattaggtggaacattagcaattatgcagaaaacccttaacataaacaatatccaaatgaatattaaatagttacagcagtctgagttataaaatagatatctcggaccgtctattcttccttatttgagtgggtaccaatgaaatctttcgagctaaatcgatttctggcccactcttttttattttttagtaagcgtttacaaaaaatgaacaatgtgctatattacctctaaagttagtttgtttattaaattaaccaactaaaatgtcgggatccaattaggaggaatctgcgatggaaaagaaggaatttagagttttaataaagtattgttttcttaaaggaaagaatacagtagaagctaagacttggttagataatgaatttccagattctgctcctggtaaaagtacaattatagattggtatgcaaaatttaaaagaggagaaatgtcaacagaagatggagaaagatctggtagaccaaaagaagttgtaactgatgaaaatataaagaagatacataaaatgatattaaatgatagaaagatgaagttaatagaaatagcagaagctttaaaaatatctaaagaaagagttggacatataatacatcaatatttagatatgagaaaattatgtgcaaaatgggttccaagagaattaacttttgatcaaaagcaaagaagagtagatgatagtaagagatgtttacaattattaacaagaaatactccagaatttttcagaagatatgtaacaatggatgaaacttggttacatcattatacacctgaaagtaatagacaatcagcagaatggacagctactggagaaccatcacctaaaagaggaaagactcaaaagagtgctggaaaggttatggcatcagtattttgggatgctcatggtataatatttatagattatttagaaaaaggaaaaacaataaattctgattattatatggcattattagaaagattaaaagttgaaatagcagctaaaagaccacatatgaagaagaaaaaagtattatttcatcaagataatgctccttgtcataagtcattaagaactatggcaaagatacatgaattaggttttgaattattaccacatccaccttattcaccagatttagctccttctgatttctttttatttagtgatttaaagagaatgttagcaggaaagaagtttggttgtaatgaagaagttatagcagaaacagaagcttattttgaagcaaaacctaaggaatattatcaaaatggaataaagaagttagaaggtagatataatagatgtatagcattagaaggaaattatgtagaataagaattccttaattaaggagctcgataaaaataagaagcctgcatttgcaggcttcttatttttatggtcatagctgtttcctggcgcgccgccattatttttttgaacaattgacaattcatttcttattttttattaagtgatagtcaaaaggcataacagtgctgaatagaaagaaatttacagaaaagaaaattatagaatttagtatgattaattatactcatttatgaatgtttaattgaatacaaaaaaaaatacttgttatgtattcaattacgggttaaaatatagacaagttgaaaaatttaataaaaaaataagtcctcagctcttatatattaagctaccaacttagtatataagccaaaacttaaatgtgctaccaacacatcaagccgttagagaactctatctatagcaatatttcaaatgtaccgacatacaagagaaacattaactatatatattcaatttatgagattatcttaacagatataaatgtaaattgcaataagtaagatttagaagtttatagcctttgtgtattggaagcagtacgcaaaggcttttttatttgataaaaattagaagtatatttattttttcataattaatttatgaaaatgaaagggggtgagcaaagtgacagaggaaagcagtatcttatcaaataacaaggtattagcaatatcattattgactttagcagtaaacattatgacttttatagtgcttgtagctaagtagtacgaaagggggagctttaaaaagctccttggaatacatagaattcataaattaatttatgaaaagaagggcgtatatgaaaacttgtaaaaattgcaaagagtttattaaagatactgaaatatgcaaaatacattcgttgatgattcatgataaaacagtagcaacctattgcagtaaatacaatgagtcaagatgtttacataaagggaaagtccaatgtattaattgttcaaagatgaaccgatatggatggtgtgccataaaaatgagatgttttacagaggaagaacagaaaaaagaacgtacatgcattaaatattatgcaaggagctttaaaaaagctcatgtaaagaagagtaaaaagaaaaaataatttatttattaatttaatattgagagtgccgacacagtatgcactaaaaaatatatctgtggtgtagtgagccgatacaaaaggatagtcactcgcattttcataatacatcttatgttatgattatgtgtcggtgggacttcacgacgaaaacccacaataaaaaaagagttcggggtagggttaagcatagttgaggcaactaaacaatcaagctaggatatgcagtagcagaccgtaaggtcgttgtttaggtgtgttgtaatacatacgctattaagatgtaaaaatacggataccaatgaagggaaaagtataatttttggatgtagtttgtttgttcatctatgggcaaactacgtccaaagccgtttccaaatctgctaaaaagtatatcctttctaaaatcaaagtcaagtatgaaatcataaataaagtttaattttgaagttattatgatattatgtttttctattaaaataaattaagtatatagaatagtttaataatagtatatacttaatgtgataagtgtctgacagtgtcacagaaaggatgattgttatggattataagcggccggccagtgggcaagttgaaaaattcacaaaaatgtggtataatatctttgttcattagagcgataaacttgaatttgagagggaacttagatggtatttgaaaaaattgataaaaatagttggaacagaaaagagtattttgaccactactttgcaagtgtaccttgtacctacagcatgaccgttaaagtggatatcacacaaataaaggaaaagggaatgaaactatatcctgcaatgctttattatattgcaatgattgtaaaccgccattcagagtttaggacggcaatcaatcaagatggtgaattggggatatatgatgagatgataccaagctatacaatatttcacaatgatactgaaacattttccagcctttggactgagtgtaagtctgactttaaatcatttttagcagattatgaaagtgatacgcaacggtatggaaacaatcatagaatggaaggaaagccaaatgctccggaaaacatttttaatgtatctatgataccgtggtcaaccttcgatggctttaatctgaatttgcagaaaggatatgattatttgattcctatttttactatggggaaatattataaagaagataacaaaattatacttcctttggcaattcaagttcatcacgcagtatgtgacggatttcacatttgccgttttgtaaacgaattgcaggaattgataaatagttaacttcaggtttgtctgtaactaaaaacaagtatttaagcaaaaacatcgtagaaatacggtgttttttgttaccctaagtttaaacgagtgacggaattgtgagcggataacaattccacaggttggctgataagtccccggtctgtaccgttcgtataatgtatgctatacgaagttataggaggttataatgaacgagaaaaatataaaacacagtcaaaactttattacttcaaaacataatatagataaaataatgacaaatataagattaaatgaacatgataatatctttgaaatcggctcaggaaaagggcattttacccttgaattagtacagaggtgtaatttcgtaactgccattgaaatagaccataaattatgcaaaactacagaaaataaacttgttgatcacgataatttccaagttttaaacaaggatatattgcagtttaaatttcctaaaaaccaatcctataaaatatttggtaatataccttataacataagtacggatataatacgcaaaattgtttttgatagtatagctgatgagatttatttaatcgtggaatacgggtttgctaaaagattattaaatacaaaacgctcattggcattatttttaatggcagaagttgatatttctatattaagtatggttccaagagaatattttcatcctaaacctaaagtgaatagctcacttatcagattaaatagaaaaaaatcaagaatatcacacaaagataaacagaagtataattatttcgttatgaaatgggttaacaaagaatacaagaaaatatttacaaaaaatcaatttaacaattccttaaaacatgcaggaattgacgatttaaacaatattagctttgaacaattcttatctcttttcaatagctataaattatttaataagtaagttaagggatgcataaactgcatcccttaacttgtttttcgtgtacctattttttgtgaatcgattatgtcttttgcgcattcgtcgacaattgcatatattgataaaaataataatagtgggtataattaagttgttaggaggttagttagaatgagtagactcgataagtctaaagtgataaattccgcattagaactccttaatgaagttggaattgaaggtctaactaccaggaaattagctcagaaacttggagttgaacaaccaacattgtactggcatgtcaaaaacaaaagagcactcttagatgcattagcaatcgaaatgttagacagacatcatacacacttttgtccattagaaggtgaaagttggcaagactttttgaggaataacgcgaaaagtttcagatgtgctttactatcccatagagatggggctaaagttcacttaggaactagacctacagaaaagcagtatgagacacttgaaaatcagttggcatttctatgtcaacaaggattctcattagagaacgcattatatgctctttcagctgtaggtcatttcacgttaggttgtgttttggaagatcaagaacatcaagttgcaaaagaagagagagaaactcctactacagatagtatgccacctttattacgacaagctatagaactgtttgatcatcaaggagctgaacctgcgtttctctttggattggagttaataatttgcggactagagaaacagcttaagtgtgaaagtggatcttagttagcaccggtcagggtggtgaatgtgaaaccagtaacgttatacgatgtcgcagagtatgccggtgtctcttatcagaccgtttcccgcgtggtgaaccaggccagccacgtttctgcgaaaacgcgggaaaaagtggaagcggcgatggcggagctgaattacattcccaaccgcgtggcacaacaactggcgggcaaacagtcgttgctgattggcgttgccacctccagtctggccctgcacgcgccgtcgcaaattgtcgcggcgattaaatctcgcgccgatcaactgggtgccagcgtggtggtgtcgatggtagaacgaagcggcgtcgaagcctgtaaagcggcggtgcacaatcttctcgcgcaacgcgtcagtgggctgatcattaactatccgctggatgaccaggatgccattgctgtggaagctgcctgcactaatgttccggcgttatttcttgatgtctctgaccagacacccatcaacagtattattttctcccatgaagacggtacgcgactgggcgtggagcatctggtcgcattgggtcaccagcaaatcgcgctgttagcgggcccattaagttctgtctcggcgcgtctgcgtctggctggctggcataaatatctcactcgcaatcaaattcagccgatagcggaacgggaaggcgactggagtgccatgtccggttttcaacaaaccatgcaaatgctgaatgagggcatcgttcccactgcgatgctggttgccaacgatcagatggcgctgggcgcaatgcgcgccattaccgagtccgggctgcgcgttggtgcggacatctcggtagtgggatacgacgataccgaagacagctcatgttatatcccgccgttaaccaccatcaaacaggattttcgcctgctggggcaaaccagcgtggaccgcttgctgcaactctctcagggccaggcggtgaagggcaatcagctgttgcccgtctcactggtgaaaagaaaaaccaccctggcgcccaatacgcaaaccgcctctccccgcgcgttggccgattcattaatgcagctggcacgacaggtttcccgactggaaagcgggcagtgagcgcaacgcaattaatgtaagttagctcactcattaggcaccgggatctcgaccgatgcccttgagagccttcaacccagtcagctccttccggtgggcgcggggcatgactagcatgatcgtgctcctgtcgttgaggacccggctaggctggcggggttgccttactggttagcagaatgaatcaccgatacgcgataacttcgtataatgtatgctatacgaacggtagctcagctagcacccgctcctgaaaatctcgataactcaacctcgctaacggattcactctatcattgatagagtttgaaactctatcattgatagagtataatatctttgttcattagagcgataaacttgaattttaggagggaacttagatgaataaagctattacaagaattaaagtaagatatgctgagactgataaaatgggaatagtgtatcatgcaaattactatgtctattttgaagctgcaagagaggatttaatagaaggagcagggataaagtatagtgatatggaagacataggaataatgatgcctcttgttgaaacaaagtgtaaatatcatgagggagcaaaatatggggattacatattagtagagacaaccttagggaagcttagtccaataaaagtagaaattaattacagagttttaagagaatctgatgggaaacttttagcagaaggacagacaacacaagtatttgttgatgctcaaaattttaaaataataaagctaatgaaaagttatcctgaagtgtgggagaaacttcagaaaattaaatagttaggaggaacgtataaatatgaagaattgtgtaatcgtgagtgcagttagaactgctataggctcttttaatggaagtttagcatctacaagtgcaatcgatcttggagctactgtcatcaaagctgcaatagaaagggcaaaaatagactcacaacacgttgacgaagtaataatggggaatgttcttcaagctggtttaggacaaaaccctgctagacaagcattactcaaaagtggtctagcagaaacagtttgcggctttacggttaacaaagtttgtggatcagggcttaaatctgtcgctttagcagctcaagcaattcaagcaggtcaagctcagagtatagttgctggtggaatggaaaatatgtctcttgcaccatacttattggatgctaaagctagaagtgggtatagactaggtgatggtcaggtatatgacgttatactaagagatgggttaatgtgtgcaacacatgggtatcatatgggcataactgctgaaaatgtcgctaaggaatatggcataacacgagaaatgcaagatgaactcgcattacactcacagagaaaagcagcagctgctatagaatcaggagcatttactgctgagatagttccagtcaatgtcgttactcgtaaaaagaccttcgtattcagtcaggatgaatttcctaaggcgaatagtacagcagaagctttaggagcattaagaccagcgtttgataaagcaggtacagttacagctggaaatgcatcagggataaatgatggagcagcagcattggtgattatggaagagagtgcagctttagcagcaggtttgactcctttagcaaggattaagagctatgctagtggtggagttccgcctgctttaatgggaatgggacctgttcctgctacacagaaagctctccaactagctggattacaactggcagacattgatctcatcgaagcaaatgaggcatttgctgcacaatttctcgcagtaggtaagaacttaggcttcgattcagagaaagtcaatgtaaatggaggtgcaattgcgttaggtcatccaataggagcttcaggtgcaagaatcctagtaaccttgttacatgctatgcaagctagagataaaacccttggattagcgacgttatgtataggaggtggacaaggaatcgctatggtaattgagagactgaattagaggaggtgacttttatgttaaaggatgaagtaattaaacaaattagcacgccattaacttcgcctgcatttcctagaggaccctataaatttcataatcgtgagtattttaacattgtatatcgtacagatatggatgcacttcgtaaagttgtgccagagcctttagaaattgatgagcccttagtcaggtttgaaattatggcaatgcatgatacgagtggacttggttgttatacagaaagcggacaggctattcccgtaagctttaatggagttaagggagattatcttcatatgatgtatttagataatgagcctgcaattgcagtaggaagggaattaagtgcatatcctaaaaagctcgggtatccaaagctttttgtggattcagatactttagtaggaactttagactatggaaaacttagagttgcgacagctacaatggggtacaaacataaagccttagatgctaatgaagcaaaggatcaaatttgtcgccctaattatatgttgaaaataatacccaattatgatggaagccctagaatatgtgagcttataaatgcgaaaatcacagatgttaccgtacatgaagcttggacaggaccaactcgactgcagttatttgatcacgctatggcgccacttaatgatttgccagtaaaagagattgtttctagctctcacattcttgcagatataatattgcctagagctgaagttatatatgattatcttaagtaataaaaataagagttaccttaaatggtaactcttatttttttaatattgtttcatagtatttctttctaaacagccatggaaacgagtgactcgagaacatgtgagcaataaaaataagaagcctgcatttgcaggcttcttatttttatagaccggggacttatcagccaacctgtaggccagcaaaaggccaggaaccgtaaaaaggccgcgttgctggcgtttttccataggctccgcccccctgacgagcatcacaaaaatcgacgctcaagtcagaggtggcgaaacccgacaggactataaagataccaggcgtttccccctggaagctccctcgtgcgctctcctgttccgaccctgccgcttaccggatacctgtccgcctttctcccttcgggaagcgtggcgctttctcatagctcacgctgtaggtatctcagttcggtgtaggtcgttcgctccaagctgggctgtgtgcacgaaccccccgttcagcccgaccgctgcgccttatccggtaactatcgtcttgagtccaacccggtaagacacgacttatcgccactggcagcagccactggtaacaggattagcagagcgaggtatgtaggcggtgctacagagttcttgaagtggtggcctaactacggctacactagaagaacagtatttggtatctgcgctctgctgaagccagttaccttcggaaaaagagttggtagctcttgatccggcaaacaaaccaccgctggtagcggtggtttttttgtttgcaagcagcagattacgcgcagaaaaaaaggatctcaagaagatcctttgatcttttctacggggtctgacgctcagtggaacgaaaactcacgttaagggattttggtcatgagattatcaaaaaggatcttcacctagatccttttaaattaaaaatgaagttttaaatcaatctaaagtatatatgagtaaacttggtctgacagttaccaatgcttaatcagtgaggcacctatctcagcgatctgtctatttcgttcatccatagttgcctgactccccgtcgtgtagataactacgatacgggagggcttaccatctggccccagtgctgcaatgataccgcgagacccacgctcaccggctccagatttatcagcaataaaccagccagccggaagggccgagcgcagaagtggtcctgcaactttatccgcctccatccagtctattaattgttgccgggaagctagagtaagtagttcgccagttaatagtttgcgcaacgttgttgccattgctacaggcatcgtggtgtcacgctcgtcgtttggtatggcttcattcagctccggttcccaacgatcaaggcgagttacatgatcccccatgttgtgcaaaaaagcggttagctccttcggtcctccgatcgttgtcagaagtaagttggccgcagtgttatcactcatggttatggcagcactgcataattctcttactgtcatgccatccgtaagatgcttttctgtgactggtgagtactcaaccaagtcattctgagaatagtgtatgcggcgaccgagttgctcttgcccggcgtcaatacgggataataccgcgccacatagcagaactttaaaagtgctcatcattggaaaacgttcttcggggcgaaaactctcaaggatcttaccgctgttgagatccagttcgatgtaacccactcgtgcacccaactgatcttcagcatcttttactttcaccagcgtttctgggtgagcaaaaacaggaaggcaaaatgccgcaaaaaagggaataagggcgacacggaaatgttgaatactcatactcttcctttttcaatattattgaagcatttatcagggttattgtctcatgagcggatacatatttgaatgtatttagaaaaataaacaaataggggttccgcgcacatttccccgaaaagtgccacctg

SEQ ID NO: 21 - DNA, 11785 bp, artificial sequence
  plasmid BG289
acggtcctgcaggtaatacgactcactatagggataacttaaatttatattttttactttataatatataattgattatagaatccaaattagataggaggaccaggtaaatggagaataattttattgtcaacgaaaacgagaaaagggttttaaagcagatatttaacaactccaatatcagtagaactcaaatttccaagaatttagaactgaataaagcaacaatttcgaacattcttaacaatctaaagcataaaagtttggtaaatgaagttggtgaaggaaattctactaaaagtggtggaagaaaacctatacttctcgaaattaatcaaaagtatgggtattatataagcatggatttgacatatgattctgttgagttaatgtataactattttgatgctacaattctcaaacaagatagttatgaactgaatgataagaatgtaagtagcatattacagatactcaaatctaacataaatgttagcgaaaaatacgacacattatacggtttattagggataagtatatccatacatgggattgtagatgatgaacaaaacatcattaatctaccatttcacaagaatgaaaaaagaacgtttactgatgaacttaagtctttcactaatgtaccagtggttattgaaaatgaggcaaatttaagtgcattatacgagaaaagtttatacatcaattcgaatattaacaacttgatcacattgtctatacataaaggtataggagctggcatcataatcaataagaaactctatagaggtagtaatggagaagctggagaaataggaaagactcttgttttagagtctatcaataacaatgataacaagtactataaaatagaggatatttgtagtcaagacgctttgatacaaaagattaataacagattaggagttacacttacatttaccgaactaatacagtattataacgaaggaaatagtattgtagctcatgaaatcaaacagtttatcaacaaaatgactgtcttaatacacaatcttaatactcagtttaatccagatgcaatatacatcaattgtcccttgattaatgaacttcctaatattctaaacgaaatcaaagaacaattctcttgtttttcacaaggaagtcctatacaattgcatttaaccactaatgttaaacaagctacattattaggtggaacattagcaattatgcagaaaacccttaacataaacaatatccaaatgaatattaaatagttacagcagtctgagttataaaatagatatctcggaccgtctattcttccttatttgagtgggtaccaatgaaatctttcgagctaaatcgatttctggcccactcttttttattttttagtaagcgtttacaaaaaatgaacaatgtgctatattacctctaaagttagtttgtttattaaattaaccaactaaaatgtcgggatccaattaggaggaatctgcgatggaaaagaaggaatttagagttttaataaagtattgttttcttaaaggaaagaatacagtagaagctaagacttggttagataatgaatttccagattctgctcctggtaaaagtacaattatagattggtatgcaaaatttaaaagaggagaaatgtcaacagaagatggagaaagatctggtagaccaaaagaagttgtaactgatgaaaatataaagaagatacataaaatgatattaaatgatagaaagatgaagttaatagaaatagcagaagctttaaaaatatctaaagaaagagttggacatataatacatcaatatttagatatgagaaaattatgtgcaaaatgggttccaagagaattaacttttgatcaaaagcaaagaagagtagatgatagtaagagatgtttacaattattaacaagaaatactccagaatttttcagaagatatgtaacaatggatgaaacttggttacatcattatacacctgaaagtaatagacaatcagcagaatggacagctactggagaaccatcacctaaaagaggaaagactcaaaagagtgctggaaaggttatggcatcagtattttgggatgctcatggtataatatttatagattatttagaaaaaggaaaaacaataaattctgattattatatggcattattagaaagattaaaagttgaaatagcagctaaaagaccacatatgaagaagaaaaaagtattatttcatcaagataatgctccttgtcataagtcattaagaactatggcaaagatacatgaattaggttttgaattattaccacatccaccttattcaccagatttagctccttctgatttctttttatttagtgatttaaagagaatgttagcaggaaagaagtttggttgtaatgaagaagttatagcagaaacagaagcttattttgaagcaaaacctaaggaatattatcaaaatggaataaagaagttagaaggtagatataatagatgtatagcattagaaggaaattatgtagaataagaattccttaattaaggagctcgataaaaataagaagcctgcatttgcaggcttcttatttttatggtcatagctgtttcctggcgcgccgccattatttttttgaacaattgacaattcatttcttattttttattaagtgatagtcaaaaggcataacagtgctgaatagaaagaaatttacagaaaagaaaattatagaatttagtatgattaattatactcatttatgaatgtttaattgaatacaaaaaaaaatacttgttatgtattcaattacgggttaaaatatagacaagttgaaaaatttaataaaaaaataagtcctcagctcttatatattaagctaccaacttagtatataagccaaaacttaaatgtgctaccaacacatcaagccgttagagaactctatctatagcaatatttcaaatgtaccgacatacaagagaaacattaactatatatattcaatttatgagattatcttaacagatataaatgtaaattgcaataagtaagatttagaagtttatagcctttgtgtattggaagcagtacgcaaaggcttttttatttgataaaaattagaagtatatttattttttcataattaatttatgaaaatgaaagggggtgagcaaagtgacagaggaaagcagtatcttatcaaataacaaggtattagcaatatcattattgactttagcagtaaacattatgacttttatagtgcttgtagctaagtagtacgaaagggggagctttaaaaagctccttggaatacatagaattcataaattaatttatgaaaagaagggcgtatatgaaaacttgtaaaaattgcaaagagtttattaaagatactgaaatatgcaaaatacattcgttgatgattcatgataaaacagtagcaacctattgcagtaaatacaatgagtcaagatgtttacataaagggaaagtccaatgtattaattgttcaaagatgaaccgatatggatggtgtgccataaaaatgagatgttttacagaggaagaacagaaaaaagaacgtacatgcattaaatattatgcaaggagctttaaaaaagctcatgtaaagaagagtaaaaagaaaaaataatttatttattaatttaatattgagagtgccgacacagtatgcactaaaaaatatatctgtggtgtagtgagccgatacaaaaggatagtcactcgcattttcataatacatcttatgttatgattatgtgtcggtgggacttcacgacgaaaacccacaataaaaaaagagttcggggtagggttaagcatagttgaggcaactaaacaatcaagctaggatatgcagtagcagaccgtaaggtcgttgtttaggtgtgttgtaatacatacgctattaagatgtaaaaatacggataccaatgaagggaaaagtataatttttggatgtagtttgtttgttcatctatgggcaaactacgtccaaagccgtttccaaatctgctaaaaagtatatcctttctaaaatcaaagtcaagtatgaaatcataaataaagtttaattttgaagttattatgatattatgtttttctattaaaataaattaagtatatagaatagtttaataatagtatatacttaatgtgataagtgtctgacagtgtcacagaaaggatgattgttatggattataagcggccggccagtgggcaagttgaaaaattcacaaaaatgtggtataatatctttgttcattagagcgataaacttgaatttgagagggaacttagatggtatttgaaaaaattgataaaaatagttggaacagaaaagagtattttgaccactactttgcaagtgtaccttgtacctacagcatgaccgttaaagtggatatcacacaaataaaggaaaagggaatgaaactatatcctgcaatgctttattatattgcaatgattgtaaaccgccattcagagtttaggacggcaatcaatcaagatggtgaattggggatatatgatgagatgataccaagctatacaatatttcacaatgatactgaaacattttccagcctttggactgagtgtaagtctgactttaaatcatttttagcagattatgaaagtgatacgcaacggtatggaaacaatcatagaatggaaggaaagccaaatgctccggaaaacatttttaatgtatctatgataccgtggtcaaccttcgatggctttaatctgaatttgcagaaaggatatgattatttgattcctatttttactatggggaaatattataaagaagataacaaaattatacttcctttggcaattcaagttcatcacgcagtatgtgacggatttcacatttgccgttttgtaaacgaattgcaggaattgataaatagttaacttcaggtttgtctgtaactaaaaacaagtatttaagcaaaaacatcgtagaaatacggtgttttttgttaccctaagtttaaacgagtgacggaattgtgagcggataacaattccacaggttggctgataagtccccggtctgtaccgttcgtataatgtatgctatacgaagttataggaggttataatgaacgagaaaaatataaaacacagtcaaaactttattacttcaaaacataatatagataaaataatgacaaatataagattaaatgaacatgataatatctttgaaatcggctcaggaaaagggcattttacccttgaattagtacagaggtgtaatttcgtaactgccattgaaatagaccataaattatgcaaaactacagaaaataaacttgttgatcacgataatttccaagttttaaacaaggatatattgcagtttaaatttcctaaaaaccaatcctataaaatatttggtaatataccttataacataagtacggatataatacgcaaaattgtttttgatagtatagctgatgagatttatttaatcgtggaatacgggtttgctaaaagattattaaatacaaaacgctcattggcattatttttaatggcagaagttgatatttctatattaagtatggttccaagagaatattttcatcctaaacctaaagtgaatagctcacttatcagattaaatagaaaaaaatcaagaatatcacacaaagataaacagaagtataattatttcgttatgaaatgggttaacaaagaatacaagaaaatatttacaaaaaatcaatttaacaattccttaaaacatgcaggaattgacgatttaaacaatattagctttgaacaattcttatctcttttcaatagctataaattatttaataagtaagttaagggatgcataaactgcatcccttaacttgtttttcgtgtacctattttttgtgaatcgattatgtcttttgcgcattcgtcgacaattgcatatattgataaaaataataatagtgggtataattaagttgttaggaggttagttagaatgagtagactcgataagtctaaagtgataaattccgcattagaactccttaatgaagttggaattgaaggtctaactaccaggaaattagctcagaaacttggagttgaacaaccaacattgtactggcatgtcaaaaacaaaagagcactcttagatgcattagcaatcgaaatgttagacagacatcatacacacttttgtccattagaaggtgaaagttggcaagactttttgaggaataacgcgaaaagtttcagatgtgctttactatcccatagagatggggctaaagttcacttaggaactagacctacagaaaagcagtatgagacacttgaaaatcagttggcatttctatgtcaacaaggattctcattagagaacgcattatatgctctttcagctgtaggtcatttcacgttaggttgtgttttggaagatcaagaacatcaagttgcaaaagaagagagagaaactcctactacagatagtatgccacctttattacgacaagctatagaactgtttgatcatcaaggagctgaacctgcgtttctctttggattggagttaataatttgcggactagagaaacagcttaagtgtgaaagtggatcttagttagcaccggtcagggtggtgaatgtgaaaccagtaacgttatacgatgtcgcagagtatgccggtgtctcttatcagaccgtttcccgcgtggtgaaccaggccagccacgtttctgcgaaaacgcgggaaaaagtggaagcggcgatggcggagctgaattacattcccaaccgcgtggcacaacaactggcgggcaaacagtcgttgctgattggcgttgccacctccagtctggccctgcacgcgccgtcgcaaattgtcgcggcgattaaatctcgcgccgatcaactgggtgccagcgtggtggtgtcgatggtagaacgaagcggcgtcgaagcctgtaaagcggcggtgcacaatcttctcgcgcaacgcgtcagtgggctgatcattaactatccgctggatgaccaggatgccattgctgtggaagctgcctgcactaatgttccggcgttatttcttgatgtctctgaccagacacccatcaacagtattattttctcccatgaagacggtacgcgactgggcgtggagcatctggtcgcattgggtcaccagcaaatcgcgctgttagcgggcccattaagttctgtctcggcgcgtctgcgtctggctggctggcataaatatctcactcgcaatcaaattcagccgatagcggaacgggaaggcgactggagtgccatgtccggttttcaacaaaccatgcaaatgctgaatgagggcatcgttcccactgcgatgctggttgccaacgatcagatggcgctgggcgcaatgcgcgccattaccgagtccgggctgcgcgttggtgcggacatctcggtagtgggatacgacgataccgaagacagctcatgttatatcccgccgttaaccaccatcaaacaggattttcgcctgctggggcaaaccagcgtggaccgcttgctgcaactctctcagggccaggcggtgaagggcaatcagctgttgcccgtctcactggtgaaaagaaaaaccaccctggcgcccaatacgcaaaccgcctctccccgcgcgttggccgattcattaatgcagctggcacgacaggtttcccgactggaaagcgggcagtgagcgcaacgcaattaatgtaagttagctcactcattaggcaccgggatctcgaccgatgcccttgagagccttcaacccagtcagctccttccggtgggcgcggggcatgactagcatgatcgtgctcctgtcgttgaggacccggctaggctggcggggttgccttactggttagcagaatgaatcaccgatacgcgataacttcgtataatgtatgctatacgaacggtagctcagctagcacccgctcctgaaaatctcgataactcaacctcgctaacggattcactctatcattgatagagtttgaaactctatcattgatagagtataatatctttgttcattagagcgataaacttgaattttaggagggaacttagatggaagcgagacgcagtgccaattatgaaccaaatagctgggattatgattatcttctgagtagtgataccgatgaaagcattgaagtatataaagataaagccaaaaaattagaagcagaagtgagacgtgaaattaataatgaaaaagctgaatttctgacactgttagaacttattgataatgtgcagcgcctgggattaggctatagatttgaaagcgatattagaggcgcactggatcgttttgtgagttcaggtggatttgatgctgttacaaaaactagccttcatggaactgcgctgagttttcgccttctgagacagcacggctttgaagttagccaagaagcctttagtggttttaaagatcaaaatggaaattttctggaaaatcttaaagaagatattaaagcaatactttcactgtatgaagcaagttttctggcacttgaaggagaaaatatacttgatgaagctaaagtttttgcgatttcacatcttaaagaactgtctgaagaaaaaattggcaaagaactggctgaacaggttaatcatgcgctggaattaccgcttcaccgcagaacccaaagattagaagccgtttggtctattgaagcatatcgtaaaaaagaagatgccaatcaggtacttcttgaattagcaatacttgattataatatgattcagagcgtgtatcaacgtgatcttcgcgaaaccagtagatggtggcgtcgcgttggccttgctacgaaactgcattttgcgagagatcgtctgattgaaagcttttattgggccgtgggtgttgcatttgaaccacaatatagcgattgtcgtaatagtgttgcaaaaatgtttagttttgtaactataattgatgatatttatgatgtttatggtacacttgatgaactggaactttttactgatgctgtagaacgctgggatgtgaatgcgattaatgatctgccagattatatgaaactttgttttcttgccctgtataatacaattaatgaaattgcatatgataatcttaaagataaaggagaaaatatactgccttatttaactaaagcatgggctgatttatgcaatgcttttcttcaggaagcgaaatggctgtataataaatcaacccctacgtttgatgattattttggcaatgcttggaaatctagcagtggtccgttacagcttgtttttgcttattttgcggttgtacaaaatattaaaaaagaagaaattgaaaatctgcaaaaatatcatgatactatttcacgtccttctcacatatttcgcttatgtaatgatcttgcgtcagcaagtgcagaaattgcccgcggtgaaaccgcaaatagcgtaagttgctatatgagaacaaaaggaatttcagaagaacttgcaactgaatctgtgatgaatctgattgatgaaacctggaagaaaatgaataaagaaaaattaggcggttctccgtttgctaaaccatttgtagaaacggctataaatcttgcgcgtcagtcacattgcacctatcacaatggagatgcgcatacgtctccggatgaacttaccagaaaaagagtgctgagtgtgattaccgaaccgatactgccatttgaacgctaaccgcggaggccggcgcggccgatttaaatcctcagcctgagccataaaaataagaagcctgcatttgcaggcttcttatttttataacagctgtcccgggagaagtaaacgagtgactcgagaacatgtgagcaataaaaataagaagcctgcatttgcaggcttcttatttttatagaccggggacttatcagccaacctgtaggccagcaaaaggccaggaaccgtaaaaaggccgcgttgctggcgtttttccataggctccgcccccctgacgagcatcacaaaaatcgacgctcaagtcagaggtggcgaaacccgacaggactataaagataccaggcgtttccccctggaagctccctcgtgcgctctcctgttccgaccctgccgcttaccggatacctgtccgcctttctcccttcgggaagcgtggcgctttctcatagctcacgctgtaggtatctcagttcggtgtaggtcgttcgctccaagctgggctgtgtgcacgaaccccccgttcagcccgaccgctgcgccttatccggtaactatcgtcttgagtccaacccggtaagacacgacttatcgccactggcagcagccactggtaacaggattagcagagcgaggtatgtaggcggtgctacagagttcttgaagtggtggcctaactacggctacactagaagaacagtatttggtatctgcgctctgctgaagccagttaccttcggaaaaagagttggtagctcttgatccggcaaacaaaccaccgctggtagcggtggtttttttgtttgcaagcagcagattacgcgcagaaaaaaaggatctcaagaagatcctttgatcttttctacggggtctgacgctcagtggaacgaaaactcacgttaagggattttggtcatgagattatcaaaaaggatcttcacctagatccttttaaattaaaaatgaagttttaaatcaatctaaagtatatatgagtaaacttggtctgacagttaccaatgcttaatcagtgaggcacctatctcagcgatctgtctatttcgttcatccatagttgcctgactccccgtcgtgtagataactacgatacgggagggcttaccatctggccccagtgctgcaatgataccgcgagacccacgctcaccggctccagatttatcagcaataaaccagccagccggaagggccgagcgcagaagtggtcctgcaactttatccgcctccatccagtctattaattgttgccgggaagctagagtaagtagttcgccagttaatagtttgcgcaacgttgttgccattgctacaggcatcgtggtgtcacgctcgtcgtttggtatggcttcattcagctccggttcccaacgatcaaggcgagttacatgatcccccatgttgtgcaaaaaagcggttagctccttcggtcctccgatcgttgtcagaagtaagttggccgcagtgttatcactcatggttatggcagcactgcataattctcttactgtcatgccatccgtaagatgcttttctgtgactggtgagtactcaaccaagtcattctgagaatagtgtatgcggcgaccgagttgctcttgcccggcgtcaatacgggataataccgcgccacatagcagaactttaaaagtgctcatcattggaaaacgttcttcggggcgaaaactctcaaggatcttaccgctgttgagatccagttcgatgtaacccactcgtgcacccaactgatcttcagcatcttttactttcaccagcgtttctgggtgagcaaaaacaggaaggcaaaatgccgcaaaaaagggaataagggcgacacggaaatgttgaatactcatactcttcctttttcaatattattgaagcatttatcagggttattgtctcatgagcggatacatatttgaatgtatttagaaaaataaacaaataggggttccgcgcacatttccccgaaaagtgccacctg

SEQ ID NO: 22 - DNA, 11994 bp, artificial sequence
  plasmid BG290
acggtcctgcaggtaatacgactcactatagggataacttaaatttatattttttactttataatatataattgattatagaatccaaattagataggaggaccaggtaaatggagaataattttattgtcaacgaaaacgagaaaagggttttaaagcagatatttaacaactccaatatcagtagaactcaaatttccaagaatttagaactgaataaagcaacaatttcgaacattcttaacaatctaaagcataaaagtttggtaaatgaagttggtgaaggaaattctactaaaagtggtggaagaaaacctatacttctcgaaattaatcaaaagtatgggtattatataagcatggatttgacatatgattctgttgagttaatgtataactattttgatgctacaattctcaaacaagatagttatgaactgaatgataagaatgtaagtagcatattacagatactcaaatctaacataaatgttagcgaaaaatacgacacattatacggtttattagggataagtatatccatacatgggattgtagatgatgaacaaaacatcattaatctaccatttcacaagaatgaaaaaagaacgtttactgatgaacttaagtctttcactaatgtaccagtggttattgaaaatgaggcaaatttaagtgcattatacgagaaaagtttatacatcaattcgaatattaacaacttgatcacattgtctatacataaaggtataggagctggcatcataatcaataagaaactctatagaggtagtaatggagaagctggagaaataggaaagactcttgttttagagtctatcaataacaatgataacaagtactataaaatagaggatatttgtagtcaagacgctttgatacaaaagattaataacagattaggagttacacttacatttaccgaactaatacagtattataacgaaggaaatagtattgtagctcatgaaatcaaacagtttatcaacaaaatgactgtcttaatacacaatcttaatactcagtttaatccagatgcaatatacatcaattgtcccttgattaatgaacttcctaatattctaaacgaaatcaaagaacaattctcttgtttttcacaaggaagtcctatacaattgcatttaaccactaatgttaaacaagctacattattaggtggaacattagcaattatgcagaaaacccttaacataaacaatatccaaatgaatattaaatagttacagcagtctgagttataaaatagatatctcggaccgtctattcttccttatttgagtgggtaccaatgaaatctttcgagctaaatcgatttctggcccactcttttttattttttagtaagcgtttacaaaaaatgaacaatgtgctatattacctctaaagttagtttgtttattaaattaaccaactaaaatgtcgggatccaattaggaggaatctgcgatggaaaagaaggaatttagagttttaataaagtattgttttcttaaaggaaagaatacagtagaagctaagacttggttagataatgaatttccagattctgctcctggtaaaagtacaattatagattggtatgcaaaatttaaaagaggagaaatgtcaacagaagatggagaaagatctggtagaccaaaagaagttgtaactgatgaaaatataaagaagatacataaaatgatattaaatgatagaaagatgaagttaatagaaatagcagaagctttaaaaatatctaaagaaagagttggacatataatacatcaatatttagatatgagaaaattatgtgcaaaatgggttccaagagaattaacttttgatcaaaagcaacagagagtagatgatagtgagagatgtttacaattattaacaagaaatactccagaatttttcagaagatatgtaacaatggatgaaacttggttacatcattatacacctgaaagtaatagacaatcagcagaatggacagctactggagaaccatcacctaaaagaggaaagactcaaaagagtgctggaaaggttatggcatcagtattttgggatgctcatggtataatatttatagattatttagaaaaaggaaaaacaataaattctgattattatatggcattattagaaagattaaaagttgaaatagcagctaaaagaccacatatgaagaagaaaaaagtattatttcatcaagataatgctccttgtcataagtcattaagaactatggcaaagatacatgaattaggttttgaattattaccacatccaccttattcaccagatttagctccttctgatttctttttatttagtgatttaaagagaatgttagcaggaaagaagtttggttgtaatgaagaagttatagcagaaacagaagcttattttgaagcaaaacctaaggaatattatcaaaatggaataaagaagttagaaggtagatataatagatgtatagcattagaaggaaattatgtagaataagaattccttaattaaggagctcgataaaaataagaagcctgcatttgcaggcttcttatttttatggtcatagctgtttcctggcgcgccgccattatttttttgaacaattgacaattcatttcttattttttattaagtgatagtcaaaaggcataacagtgctgaatagaaagaaatttacagaaaagaaaattatagaatttagtatgattaattatactcatttatgaatgtttaattgaatacaaaaaaaaatacttgttatgtattcaattacgggttaaaatatagacaagttgaaaaatttaataaaaaaataagtcctcagctcttatatattaagctaccaacttagtatataagccaaaacttaaatgtgctaccaacacatcaagccgttagagaactctatctatagcaatatttcaaatgtaccgacatacaagagaaacattaactatatatattcaatttatgagattatcttaacagatataaatgtaaattgcaataagtaagatttagaagtttatagcctttgtgtattggaagcagtacgcaaaggcttttttatttgataaaaattagaagtatatttattttttcataattaatttatgaaaatgaaagggggtgagcaaagtgacagaggaaagcagtatcttatcaaataacaaggtattagcaatatcattattgactttagcagtaaacattatgacttttatagtgcttgtagctaagtagtacgaaagggggagctttaaaaagctccttggaatacatagaattcataaattaatttatgaaaagaagggcgtatatgaaaacttgtaaaaattgcaaagagtttattaaagatactgaaatatgcaaaatacattcgttgatgattcatgataaaacagtagcaacctattgcagtaaatacaatgagtcaagatgtttacataaagggaaagtccaatgtattaattgttcaaagatgaaccgatatggatggtgtgccataaaaatgagatgttttacagaggaagaacagaaaaaagaacgtacatgcattaaatattatgcaaggagctttaaaaaagctcatgtaaagaagagtaaaaagaaaaaataatttatttattaatttaatattgagagtgccgacacagtatgcactaaaaaatatatctgtggtgtagtgagccgatacaaaaggatagtcactcgcattttcataatacatcttatgttatgattatgtgtcggtgggacttcacgacgaaaacccacaataaaaaaagagttcggggtagggttaagcatagttgaggcaactaaacaatcaagctaggatatgcagtagcagaccgtaaggtcgttgtttaggtgtgttgtaatacatacgctattaagatgtaaaaatacggataccaatgaagggaaaagtataatttttggatgtagtttgtttgttcatctatgggcaaactacgtccaaagccgtttccaaatctgctaaaaagtatatcctttctaaaatcaaagtcaagtatgaaatcataaataaagtttaattttgaagttattatgatattatgtttttctattaaaataaattaagtatatagaatagtttaataatagtatatacttaatgtgataagtgtctgacagtgtcacagaaaggatgattgttatggattataagcggccggccagtgggcaagttgaaaaattcacaaaaatgtggtataatatctttgttcattagagcgataaacttgaatttgagagggaacttagatggtatttgaaaaaattgataaaaatagttggaacagaaaagagtattttgaccactactttgcaagtgtaccttgtacctacagcatgaccgttaaagtggatatcacacaaataaaggaaaagggaatgaaactatatcctgcaatgctttattatattgcaatgattgtaaaccgccattcagagtttaggacggcaatcaatcaagatggtgaattggggatatatgatgagatgataccaagctatacaatatttcacaatgatactgaaacattttccagcctttggactgagtgtaagtctgactttaaatcatttttagcagattatgaaagtgatacgcaacggtatggaaacaatcatagaatggaaggaaagccaaatgctccggaaaacatttttaatgtatctatgataccgtggtcaaccttcgatggctttaatctgaatttgcagaaaggatatgattatttgattcctatttttactatggggaaatattataaagaagataacaaaattatacttcctttggcaattcaagttcatcacgcagtatgtgacggatttcacatttgccgttttgtaaacgaattgcaggaattgataaatagttaacttcaggtttgtctgtaactaaaaacaagtatttaagcaaaaacatcgtagaaatacggtgttttttgttaccctaagtttaaacgagtgacggaattgtgagcggataacaattccacaggttggctgataagtccccggtctgtaccgttcgtataatgtatgctatacgaagttataggaggttataatgaacgagaaaaatataaaacacagtcaaaactttattacttcaaaacataatatagataaaataatgacaaatataagattaaatgaacatgataatatctttgaaatcggctcaggaaaagggcattttacccttgaattagtacagaggtgtaatttcgtaactgccattgaaatagaccataaattatgcaaaactacagaaaataaacttgttgatcacgataatttccaagttttaaacaaggatatattgcagtttaaatttcctaaaaaccaatcctataaaatatttggtaatataccttataacataagtacggatataatacgcaaaattgtttttgatagtatagctgatgagatttatttaatcgtggaatacgggtttgctaaaagattattaaatacaaaacgctcattggcattatttttaatggcagaagttgatatttctatattaagtatggttccaagagaatattttcatcctaaacctaaagtgaatagctcacttatcagattaaatagaaaaaaatcaagaatatcacacaaagataaacagaagtataattatttcgttatgaaatgggttaacaaagaatacaagaaaatatttacaaaaaatcaatttaacaattccttaaaacatgcaggaattgacgatttaaacaatattagctttgaacaattcttatctcttttcaatagctataaattatttaataagtaagttaagggatgcataaactgcatcccttaacttgtttttcgtgtacctattttttgtgaatcgattatgtcttttgcgcattcgtcgacaattgcatatattgataaaaataataatagtgggtataattaagttgttaggaggttagttagaatgagtagactcgataagtctaaagtgataaattccgcattagaactccttaatgaagttggaattgaaggtctaactaccaggaaattagctcagaaacttggagttgaacaaccaacattgtactggcatgtcaaaaacaaaagagcactcttagatgcattagcaatcgaaatgttagacagacatcatacacacttttgtccattagaaggtgaaagttggcaagactttttgaggaataacgcgaaaagtttcagatgtgctttactatcccatagagatggggctaaagttcacttaggaactagacctacagaaaagcagtatgagacacttgaaaatcagttggcatttctatgtcaacaaggattctcattagagaacgcattatatgctctttcagctgtaggtcatttcacgttaggttgtgttttggaagatcaagaacatcaagttgcaaaagaagagagagaaactcctactacagatagtatgccacctttattacgacaagctatagaactgtttgatcatcaaggagctgaacctgcgtttctctttggattggagttaataatttgcggactagagaaacagcttaagtgtgaaagtggatcttagttagcaccggtcagggtggtgaatgtgaaaccagtaacgttatacgatgtcgcagagtatgccggtgtctcttatcagaccgtttcccgcgtggtgaaccaggccagccacgtttctgcgaaaacgcgggaaaaagtggaagcggcgatggcggagctgaattacattcccaaccgcgtggcacaacaactggcgggcaaacagtcgttgctgattggcgttgccacctccagtctggccctgcacgcgccgtcgcaaattgtcgcggcgattaaatctcgcgccgatcaactgggtgccagcgtggtggtgtcgatggtagaacgaagcggcgtcgaagcctgtaaagcggcggtgcacaatcttctcgcgcaacgcgtcagtgggctgatcattaactatccgctggatgaccaggatgccattgctgtggaagctgcctgcactaatgttccggcgttatttcttgatgtctctgaccagacacccatcaacagtattattttctcccatgaagacggtacgcgactgggcgtggagcatctggtcgcattgggtcaccagcaaatcgcgctgttagcgggcccattaagttctgtctcggcgcgtctgcgtctggctggctggcataaatatctcactcgcaatcaaattcagccgatagcggaacgggaaggcgactggagtgccatgtccggttttcaacaaaccatgcaaatgctgaatgagggcatcgttcccactgcgatgctggttgccaacgatcagatggcgctgggcgcaatgcgcgccattaccgagtccgggctgcgcgttggtgcggacatctcggtagtgggatacgacgataccgaagacagctcatgttatatcccgccgttaaccaccatcaaacaggattttcgcctgctggggcaaaccagcgtggaccgcttgctgcaactctctcagggccaggcggtgaagggcaatcagctgttgcccgtctcactggtgaaaagaaaaaccaccctggcgcccaatacgcaaaccgcctctccccgcgcgttggccgattcattaatgcagctggcacgacaggtttcccgactggaaagcgggcagtgagcgcaacgcaattaatgtaagttagctcactcattaggcaccgggatctcgaccgatgcccttgagagccttcaacccagtcagctccttccggtgggcgcggggcatgactagcatgatcgtgctcctgtcgttgaggacccggctaggctggcggggttgccttactggttagcagaatgaatcaccgatacgcgataacttcgtataatgtatgctatacgaacggtagctcagctagcacccgctcctgaaaatctcgataactcaacctcgctaacggattcactctatcattgatagagtttgaaactctatcattgatagagtataatatctttgttcattagagcgataaacttgaattttaggagggaacttagatgtgtgctactagtagtcagtttactcaaatcactgaacataattcgagaagaagtgctaattaccaacctaatctatggaatttcgagtttcttcaaagtttggaaaatgatttgaaggttgaaaaactagaagagaaagctacaaagttagaagaagaagttaggtgtatgatcaatcgagttgatactcaacctttatccttacttgaattaatagatgatgttcaaagattaggacttacctataagtttgagaaagacataatcaaagcgttagagaacatagtactattagacgaaaacaaaaagaataagtctgatttacatgctacagcactttcgtttagacttctaagacaacatggttttgaagttagtcaagatgtatttgagagatttaaagataaagaaggtggattttcaggagagttaaaaggtgatgttcaaggtttgttaagtctgtatgaagcatcttatttgggatttgaaggagaaaacctgttagaagaagctagaacattttcgataactcatctgaaaaataacctcaaagaaggaatcaacacaaaagttgctgaacaagtttctcatgcattagagttaccttatcatcagagattacatcgattagaagcaagatggtttttggacaaatacgaacctaaagaacctcatcatcagctcttgttagaacttgcaaagttagattttaatatggtccaaacattacaccaaaaggaattacaggatctaagtagatggtggactgaaatgggtttagctagtaaacttgactttgttagagacagattaatggaagtgtatttttgggcattaggaatggctcctgatccacaatttggtgaatgtagaaaagctgtaacgaaaatgttcggattagtaacgattatagatgatgtctatgatgtttacggtactttagatgaattgcaactctttacagatgcagttgaaagatgggatgtaaatgcaatcaatacgttaccagattacatgaagttatgctttttagcgttgtataataccgtcaatgatacttcatattccatacttaaggaaaaaggccacaataatctttcctatttaaccaagtcatggagagaattatgtaaggcatttttacaggaagcaaaatggtctaacaataaaataatcccagcattctctaaatatcttgaaaatgcttccgtatcatcttcaggagttgcattattagcaccatcttattttagcgtttgtcaacaacaagaagatatcagtgatcatgctctaagatccttaactgattttcatggattagtcagaagttcatgtgttatattccgtctttgtaatgatttagctacaagtgcagctgaattagaaagaggtgaaactacgaatagtattatatcctatatgcacgaaaatgatggaacaagtgaagaacaagctagagaagaattacgcaagttaattgatgcagaatggaagaaaatgaatcgtgaaagagtatctgatagcacattattacccaaagcttttatggagattgcagtaaatatggctagagtaagtcattgcacatatcagtatggagatggattaggtagacctgattatgctacagaaaatcgcataaaactcttattaatagatcctttcccaatcaatcagctaatgtatgtttagttaaggggcgccacttaatgatttgccagtaaaagagattgtttctagctctcacattcttgcagatataatattgcctagagctgaagttatatatgattatcttaagtaataaaaataagagttaccttaaatggtaactcttatttttttaatgtcgactcatagaattcgtaatcatggtcatagctgtttcctgtgtgaaattgttatccgctcacaattccacacaacatacgagccggaagcgctagcaaacgagtgactcgagaacatgtgagcaataaaaataagaagcctgcatttgcaggcttcttatttttatagaccggggacttatcagccaacctgtaggccagcaaaaggccaggaaccgtaaaaaggccgcgttgctggcgtttttccataggctccgcccccctgacgagcatcacaaaaatcgacgctcaagtcagaggtggcgaaacccgacaggactataaagataccaggcgtttccccctggaagctccctcgtgcgctctcctgttccgaccctgccgcttaccggatacctgtccgcctttctcccttcgggaagcgtggcgctttctcatagctcacgctgtaggtatctcagttcggtgtaggtcgttcgctccaagctgggctgtgtgcacgaaccccccgttcagcccgaccgctgcgccttatccggtaactatcgtcttgagtccaacccggtaagacacgacttatcgccactggcagcagccactggtaacaggattagcagagcgaggtatgtaggcggtgctacagagttcttgaagtggtggcctaactacggctacactagaagaacagtatttggtatctgcgctctgctgaagccagttaccttcggaaaaagagttggtagctcttgatccggcaaacaaaccaccgctggtagcggtggtttttttgtttgcaagcagcagattacgcgcagaaaaaaaggatctcaagaagatcctttgatcttttctacggggtctgacgctcagtggaacgaaaactcacgttaagggattttggtcatgagattatcaaaaaggatcttcacctagatccttttaaattaaaaatgaagttttaaatcaatctaaagtatatatgagtaaacttggtctgacagttaccaatgcttaatcagtgaggcacctatctcagcgatctgtctatttcgttcatccatagttgcctgactccccgtcgtgtagataactacgatacgggagggcttaccatctggccccagtgctgcaatgataccgcgagacccacgctcaccggctccagatttatcagcaataaaccagccagccggaagggccgagcgcagaagtggtcctgcaactttatccgcctccatccagtctattaattgttgccgggaagctagagtaagtagttcgccagttaatagtttgcgcaacgttgttgccattgctacaggcatcgtggtgtcacgctcgtcgtttggtatggcttcattcagctccggttcccaacgatcaaggcgagttacatgatcccccatgttgtgcaaaaaagcggttagctccttcggtcctccgatcgttgtcagaagtaagttggccgcagtgttatcactcatggttatggcagcactgcataattctcttactgtcatgccatccgtaagatgcttttctgtgactggtgagtactcaaccaagtcattctgagaatagtgtatgcggcgaccgagttgctcttgcccggcgtcaatacgggataataccgcgccacatagcagaactttaaaagtgctcatcattggaaaacgttcttcggggcgaaaactctcaaggatcttaccgctgttgagatccagttcgatgtaacccactcgtgcacccaactgatcttcagcatcttttactttcaccagcgtttctgggtgagcaaaaacaggaaggcaaaatgccgcaaaaaagggaataagggcgacacggaaatgttgaatactcatactcttcctttttcaatattattgaagcatttatcagggttattgtctcatgagcggatacatatttgaatgtatttagaaaaataaacaaataggggttccgcgcacatttccccgaaaagtgccacctg

SEQ ID NO: 23 - DNA, 15667 bp, artificial sequence
  plasmid BG291
acggtcctgcaggtaatacgactcactatagggataacttaaatttatattttttactttataatatataattgattatagaatccaaattagataggaggaccaggtaaatggagaataattttattgtcaacgaaaacgagaaaagggttttaaagcagatatttaacaactccaatatcagtagaactcaaatttccaagaatttagaactgaataaagcaacaatttcgaacattcttaacaatctaaagcataaaagtttggtaaatgaagttggtgaaggaaattctactaaaagtggtggaagaaaacctatacttctcgaaattaatcaaaagtatgggtattatataagcatggatttgacatatgattctgttgagttaatgtataactattttgatgctacaattctcaaacaagatagttatgaactgaatgataagaatgtaagtagcatattacagatactcaaatctaacataaatgttagcgaaaaatacgacacattatacggtttattagggataagtatatccatacatgggattgtagatgatgaacaaaacatcattaatctaccatttcacaagaatgaaaaaagaacgtttactgatgaacttaagtctttcactaatgtaccagtggttattgaaaatgaggcaaatttaagtgcattatacgagaaaagtttatacatcaattcgaatattaacaacttgatcacattgtctatacataaaggtataggagctggcatcataatcaataagaaactctatagaggtagtaatggagaagctggagaaataggaaagactcttgttttagagtctatcaataacaatgataacaagtactataaaatagaggatatttgtagtcaagacgctttgatacaaaagattaataacagattaggagttacacttacatttaccgaactaatacagtattataacgaaggaaatagtattgtagctcatgaaatcaaacagtttatcaacaaaatgactgtcttaatacacaatcttaatactcagtttaatccagatgcaatatacatcaattgtcccttgattaatgaacttcctaatattctaaacgaaatcaaagaacaattctcttgtttttcacaaggaagtcctatacaattgcatttaaccactaatgttaaacaagctacattattaggtggaacattagcaattatgcagaaaacccttaacataaacaatatccaaatgaatattaaatagttacagcagtctgagttataaaatagatatctcggaccgtctattcttccttatttgagtgggtaccaatgaaatctttcgagctaaatcgatttctggcccactcttttttattttttagtaagcgtttacaaaaaatgaacaatgtgctatattacctctaaagttagtttgtttattaaattaaccaactaaaatgtcgggatccaattaggaggaatctgcgatggaaaagaaggaatttagagttttaataaagtattgttttcttaaaggaaagaatacagtagaagctaagacttggttagataatgaatttccagattctgctcctggtaaaagtacaattatagattggtatgcaaaatttaaaagaggagaaatgtcaacagaagatggagaaagatctggtagaccaaaagaagttgtaactgatgaaaatataaagaagatacataaaatgatattaaatgatagaaagatgaagttaatagaaatagcagaagctttaaaaatatctaaagaaagagttggacatataatacatcaatatttagatatgagaaaattatgtgcaaaatgggttccaagagaattaacttttgatcaaaagcaacagagagtagatgatagtgagagatgtttacaattattaacaagaaatactccagaatttttcagaagatatgtaacaatggatgaaacttggttacatcattatacacctgaaagtaatagacaatcagcagaatggacagctactggagaaccatcacctaaaagaggaaagactcaaaagagtgctggaaaggttatggcatcagtattttgggatgctcatggtataatatttatagattatttagaaaaaggaaaaacaataaattctgattattatatggcattattagaaagattaaaagttgaaatagcagctaaaagaccacatatgaagaagaaaaaagtattatttcatcaagataatgctccttgtcataagtcattaagaactatggcaaagatacatgaattaggttttgaattattaccacatccaccttattcaccagatttagctccttctgatttctttttatttagtgatttaaagagaatgttagcaggaaagaagtttggttgtaatgaagaagttatagcagaaacagaagcttattttgaagcaaaacctaaggaatattatcaaaatggaataaagaagttagaaggtagatataatagatgtatagcattagaaggaaattatgtagaataagaattccttaattaaggagctcgataaaaataagaagcctgcatttgcaggcttcttatttttatggtcatagctgtttcctggcgcgccgccattatttttttgaacaattgacaattcatttcttattttttattaagtgatagtcaaaaggcataacagtgctgaatagaaagaaatttacagaaaagaaaattatagaatttagtatgattaattatactcatttatgaatgtttaattgaatacaaaaaaaaatacttgttatgtattcaattacgggttaaaatatagacaagttgaaaaatttaataaaaaaataagtcctcagctcttatatattaagctaccaacttagtatataagccaaaacttaaatgtgctaccaacacatcaagccgttagagaactctatctatagcaatatttcaaatgtaccgacatacaagagaaacattaactatatatattcaatttatgagattatcttaacagatataaatgtaaattgcaataagtaagatttagaagtttatagcctttgtgtattggaagcagtacgcaaaggcttttttatttgataaaaattagaagtatatttattttttcataattaatttatgaaaatgaaagggggtgagcaaagtgacagaggaaagcagtatcttatcaaataacaaggtattagcaatatcattattgactttagcagtaaacattatgacttttatagtgcttgtagctaagtagtacgaaagggggagctttaaaaagctccttggaatacatagaattcataaattaatttatgaaaagaagggcgtatatgaaaacttgtaaaaattgcaaagagtttattaaagatactgaaatatgcaaaatacattcgttgatgattcatgataaaacagtagcaacctattgcagtaaatacaatgagtcaagatgtttacataaagggaaagtccaatgtattaattgttcaaagatgaaccgatatggatggtgtgccataaaaatgagatgttttacagaggaagaacagaaaaaagaacgtacatgcattaaatattatgcaaggagctttaaaaaagctcatgtaaagaagagtaaaaagaaaaaataatttatttattaatttaatattgagagtgccgacacagtatgcactaaaaaatatatctgtggtgtagtgagccgatacaaaaggatagtcactcgcattttcataatacatcttatgttatgattatgtgtcggtgggacttcacgacgaaaacccacaataaaaaaagagttcggggtagggttaagcatagttgaggcaactaaacaatcaagctaggatatgcagtagcagaccgtaaggtcgttgtttaggtgtgttgtaatacatacgctattaagatgtaaaaatacggataccaatgaagggaaaagtataatttttggatgtagtttgtttgttcatctatgggcaaactacgtccaaagccgtttccaaatctgctaaaaagtatatcctttctaaaatcaaagtcaagtatgaaatcataaataaagtttaattttgaagttattatgatattatgtttttctattaaaataaattaagtatatagaatagtttaataatagtatatacttaatgtgataagtgtctgacagtgtcacagaaaggatgattgttatggattataagcggccggccagtgggcaagttgaaaaattcacaaaaatgtggtataatatctttgttcattagagcgataaacttgaatttgagagggaacttagatggtatttgaaaaaattgataaaaatagttggaacagaaaagagtattttgaccactactttgcaagtgtaccttgtacctacagcatgaccgttaaagtggatatcacacaaataaaggaaaagggaatgaaactatatcctgcaatgctttattatattgcaatgattgtaaaccgccattcagagtttaggacggcaatcaatcaagatggtgaattggggatatatgatgagatgataccaagctatacaatatttcacaatgatactgaaacattttccagcctttggactgagtgtaagtctgactttaaatcatttttagcagattatgaaagtgatacgcaacggtatggaaacaatcatagaatggaaggaaagccaaatgctccggaaaacatttttaatgtatctatgataccgtggtcaaccttcgatggctttaatctgaatttgcagaaaggatatgattatttgattcctatttttactatggggaaatattataaagaagataacaaaattatacttcctttggcaattcaagttcatcacgcagtatgtgacggatttcacatttgccgttttgtaaacgaattgcaggaattgataaatagttaacttcaggtttgtctgtaactaaaaacaagtatttaagcaaaaacatcgtagaaatacggtgttttttgttaccctaagtttaaacgagtgacggaattgtgagcggataacaattccacaggttggctgataagtccccggtctgtaccgttcgtataatgtatgctatacgaagttataggaggttataatgaacgagaaaaatataaaacacagtcaaaactttattacttcaaaacataatatagataaaataatgacaaatataagattaaatgaacatgataatatctttgaaatcggctcaggaaaagggcattttacccttgaattagtacagaggtgtaatttcgtaactgccattgaaatagaccataaattatgcaaaactacagaaaataaacttgttgatcacgataatttccaagttttaaacaaggatatattgcagtttaaatttcctaaaaaccaatcctataaaatatttggtaatataccttataacataagtacggatataatacgcaaaattgtttttgatagtatagctgatgagatttatttaatcgtggaatacgggtttgctaaaagattattaaatacaaaacgctcattggcattatttttaatggcagaagttgatatttctatattaagtatggttccaagagaatattttcatcctaaacctaaagtgaatagctcacttatcagattaaatagaaaaaaatcaagaatatcacacaaagataaacagaagtataattatttcgttatgaaatgggttaacaaagaatacaagaaaatatttacaaaaaatcaatttaacaattccttaaaacatgcaggaattgacgatttaaacaatattagctttgaacaattcttatctcttttcaatagctataaattatttaataagtaagttaagggatgcataaactgcatcccttaacttgtttttcgtgtacctattttttgtgaatcgattatgtcttttgcgcattcgtcgacaattgcatatattgataaaaataataatagtgggtataattaagttgttaggaggttagttagaatgagtagactcgataagtctaaagtgataaattccgcattagaactccttaatgaagttggaattgaaggtctaactaccaggaaattagctcagaaacttggagttgaacaaccaacattgtactggcatgtcaaaaacaaaagagcactcttagatgcattagcaatcgaaatgttagacagacatcatacacacttttgtccattagaaggtgaaagttggcaagactttttgaggaataacgcgaaaagtttcagatgtgctttactatcccatagagatggggctaaagttcacttaggaactagacctacagaaaagcagtatgagacacttgaaaatcagttggcatttctatgtcaacaaggattctcattagagaacgcattatatgctctttcagctgtaggtcatttcacgttaggttgtgttttggaagatcaagaacatcaagttgcaaaagaagagagagaaactcctactacagatagtatgccacctttattacgacaagctatagaactgtttgatcatcaaggagctgaacctgcgtttctctttggattggagttaataatttgcggactagagaaacagcttaagtgtgaaagtggatcttagttagcaccggtcagggtggtgaatgtgaaaccagtaacgttatacgatgtcgcagagtatgccggtgtctcttatcagaccgtttcccgcgtggtgaaccaggccagccacgtttctgcgaaaacgcgggaaaaagtggaagcggcgatggcggagctgaattacattcccaaccgcgtggcacaacaactggcgggcaaacagtcgttgctgattggcgttgccacctccagtctggccctgcacgcgccgtcgcaaattgtcgcggcgattaaatctcgcgccgatcaactgggtgccagcgtggtggtgtcgatggtagaacgaagcggcgtcgaagcctgtaaagcggcggtgcacaatcttctcgcgcaacgcgtcagtgggctgatcattaactatccgctggatgaccaggatgccattgctgtggaagctgcctgcactaatgttccggcgttatttcttgatgtctctgaccagacacccatcaacagtattattttctcccatgaagacggtacgcgactgggcgtggagcatctggtcgcattgggtcaccagcaaatcgcgctgttagcgggcccattaagttctgtctcggcgcgtctgcgtctggctggctggcataaatatctcactcgcaatcaaattcagccgatagcggaacgggaaggcgactggagtgccatgtccggttttcaacaaaccatgcaaatgctgaatgagggcatcgttcccactgcgatgctggttgccaacgatcagatggcgctgggcgcaatgcgcgccattaccgagtccgggctgcgcgttggtgcggacatctcggtagtgggatacgacgataccgaagacagctcatgttatatcccgccgttaaccaccatcaaacaggattttcgcctgctggggcaaaccagcgtggaccgcttgctgcaactctctcagggccaggcggtgaagggcaatcagctgttgcccgtctcactggtgaaaagaaaaaccaccctggcgcccaatacgcaaaccgcctctccccgcgcgttggccgattcattaatgcagctggcacgacaggtttcccgactggaaagcgggcagtgagcgcaacgcaattaatgtaagttagctcactcattaggcaccgggatctcgaccgatgcccttgagagccttcaacccagtcagctccttccggtgggcgcggggcatgactagcatgatcgtgctcctgtcgttgaggacccggctaggctggcggggttgccttactggttagcagaatgaatcaccgatacgcgataacttcgtataatgtatgctatacgaacggtagctcagctagcacccgctcctgaaaatctcgataactcaacctcgctaacggattcactctatcattgatagagtttgaaactctatcattgatagagtataatatctttgttcattagagcgataaacttgaattttaggagggaacttagatgcaaacggaacacgtcattttattgaatgcacagggagttcccacgggtacgctggaaaagtatgccgcacacacggcagacaccctcttacatctcgcgttctccagttggctgtttaatgccaaggggcaattattagttacccgccgcgcactgagcaaaaaagcatggcctggcgtgtggactaactcggtttgtgggcacccacaactgggagaaagcaacgaagacgcagtgatccgccgttgccgttatgagcttggcgtggaaattacgcctcctgaatctatctatcctgactttcgctatcgcgccaccgatccgaatggcattgtggaaaatgaagtgtgtccggtatttgccgcacgcaccaacagtgcgttacagatcaacgatgatgaagtgatggattatcaatggtgtgatttagcagatgtattacacggtattgatgccacgccgtgggcgttcagtccgtggatggtaatgcaggcagccaatagtgaagcaagaaaattgttgtctgctttcgcgcagcacaattaaaaaaccccgacatttgccgggctagcaggaggaattaacatggcaaccactcatttggatgtttgcgccgtggttccggcggccggatttggccgtcgaatgcaaacggaatgtcctaagcaatatctctcaatcggtaatcaaaccattcttgaacactcggtgcatgcgctgctggcgcatccccgggtgaaacgtgtcgtcattgccataagtcctggcgatagccgttttgcacaacttcctctggcgaatcatccgcaaatcaccgttgtagatggcggtgatgagcgtgccgattccgtgctgacaggtttgaaagccgctggcgacgcgcagtgggtattggtgcatgacgccgctcgtccttgtttgcatcaggatgacctcgcgcgattgttggcgttgagcgaaaccagccgcacgggggggatcctcgccgcaccagtgcgcgatactatgaaacgtgccgaaccgggcaaaaatgccattgctcataccgttgatcgcaacggcttatggcacgcgctgacgccgcaatttttccctcgtgagctgttacatgactgtctgacgcgcgctctaaatgaaggcgcgactattaccgacgaagcctcggcgctggaatattgcggattccatcctcagttggtcgaaggccgtgcggataacattaaagtcacgcgcccggaagatttggcactggccgagttttacctcacccgaaccatccatcaggagaatacataatgcgaattggacacggttttgacgtacatgcctttggcggtgaaggcccaattatcattggtggcgtacgcattccttacgaaaaaggattgctggcgcattctgatggcgacgtggcgctccatgcgttgaccgatgcattgcttggcgcggcggcgctgggggatatcggcaagctgttcccggataccgatccggcatttaaaggtgccgatagccgcgagctgctacgcgaagcctggcgtcgtattcaggcgaagggttatacccttggcaacgtcgatgtcactatcatcgctcaggcaccgaagatgttgccgcacattccacaaatgcgcgtgtttattgccgaagatctcggctgccatatggatgatgttaacgtgaaagccactactacggaaaaactgggatttaccggacgtggggaagggattgcctgtgaagcggtggcgctactcattaaggcaacaaaatgataagaagaggaggcagtgtatgagttttgatattgccaaatacccgaccctggcactggtcgactccacccaggagttacgactgttgccgaaagagagtttaccgaaactctgcgacgaactgcgccgctatttactcgacagcgtgagccgttccagcgggcacttcgcctccgggctgggcacggtcgaactgaccgtggcgctgcactatgtctacaacaccccgtttgaccaattgatttgggatgtggggcatcaggcttatccgcataaaattttgaccggacgccgcgacaaaatcggcaccatccgtcagaaaggcggtctgcacccgttcccgtggcgcggcgaaagcgaatatgacgtattaagcgtcgggcattcatcaacctccatcagtgccggaattggtattgcggttgctgccgagaaagaaggcaaaaatcgccgcaccgtctgtgtaatcggcgatggtgcgattaccgcaggcatggcgtttgaagcgatgaatcacgcgggcgatatccgtcctgatatgctggtggttctcaacgacaatgaaatgtcgatttccgaaaatgtcggcgcgctcaacaaccatctggcgcagctgctttccggtaagctttactcttcactgcgcgaaggcgggaaaaaagttttctctggcgttccgccaattaaagagctgctcaaacgcaccgaagaacatattaaaggcatggtagtgcctggcacgttgtttgaagagctgggctttaactacatcggcccggttgacggtcacgatgtgctggggcttatcaccacgcttaagaacatgcgcgacctgaaaggcccgcagttcctgcatatcatgaccaaaaaaggtcgtggttatgaaccggcagaaaaagacccaatcactttccacgccgtgcctaaatttgatccctccagcggttgtttgccgaaaagtagcggcggtttgccgagctattcaaaaatctttggcgactggttgtgtgaaacggcagcgaaagacaacaagctgatggcgattactccggcaatgcgtgaaggttccggcatggtcgagttttcacgtaaattcccggatcgctacttcgacgtggcaattgccgagcaacacgcagtgacctttgccgccggtctggcgattggtgggtacaaacccattgtcgcgatttactccactttcctgcaacgcgcctatgatcaggtgctgcatgacgtggcgattcaaaagctaccggtcctgttcgccattgaccgcgcgggcattgttggtgctgacggtcaaactcaccagggcgcttttgatctctcttacctgcgctgcataccagaaatggtcattatgaccccgagcgatgaaaacgaatgtcgccagatgctctataccggctatcactataacgatggcccgtccgcggtgcgctacccgcgcggcaacgcggttggcgtggaactgacgccgctggaaaaactaccaattggcaaaggcattgtgaagcgtcgtggcgagaaactggcgatccttaactttggtacgctgatgccagaagcggcgaaagtcgccgaatcgctgaacgccacgctggtcgatatgcgttttgtgaaaccgcttgatgaagcgttaattctggaaatggccaccagccatgaagcgctggtcaccgtagaagaaaacgccattatgggcggcgcaggtagcggagtgaacgaagtgctgatggcccatcgtaaaccagtacccgtgctgaacattggtctgccggacttctttattccgcaaggaactcaggaagaaatgcgcgccgaactcggcctcgatgccgccggtatggaagccaaaatcaaggcctggctggcataatccctactccactcctgctatgcttaacaaattattcatagactctaaataattcgagttgcaggaaggcggcaaacgagtgaagcttactgctcatctggtttaaactctcatctgatgcatccagtgaattgataaaaataataatagtgggtataatggaattgtgagcggataacaattccgtttaaacgtcgacggatccaggaggatctaaatggaagcgagacgcagtgccaattatgaaccaaatagctgggattatgattatcttctgagtagtgataccgatgaaagcattgaagtatataaagataaagccaaaaaattagaagcagaagtgagacgtgaaattaataatgaaaaagctgaatttctgacactgttagaacttattgataatgtgcagcgcctgggattaggctatagatttgaaagcgatattagaggcgcactggatcgttttgtgagttcaggtggatttgatgctgttacaaaaactagccttcatggaactgcgctgagttttcgccttctgagacagcacggctttgaagttagccaagaagcctttagtggttttaaagatcaaaatggaaattttctggaaaatcttaaagaagatattaaagcaatactttcactgtatgaagcaagttttctggcacttgaaggagaaaatatacttgatgaagctaaagtttttgcgatttcacatcttaaagaactgtctgaagaaaaaattggcaaagaactggctgaacaggttaatcatgcgctggaattaccgcttcaccgcagaacccaaagattagaagccgtttggtctattgaagcatatcgtaaaaaagaagatgccaatcaggtacttcttgaattagcaatacttgattataatatgattcagagcgtgtatcaacgtgatcttcgcgaaaccagtagatggtggcgtcgcgttggccttgctacgaaactgcattttgcgagagatcgtctgattgaaagcttttattgggccgtgggtgttgcatttgaaccacaatatagcgattgtcgtaatagtgttgcaaaaatgtttagttttgtaactataattgatgatatttatgatgtttatggtacacttgatgaactggaactttttactgatgctgtagaacgctgggatgtgaatgcgattaatgatctgccagattatatgaaactttgttttcttgccctgtataatacaattaatgaaattgcatatgataatcttaaagataaaggagaaaatatactgccttatttaactaaagcatgggctgatttatgcaatgcttttcttcaggaagcgaaatggctgtataataaatcaacccctacgtttgatgattattttggcaatgcttggaaatctagcagtggtccgttacagcttgtttttgcttattttgcggttgtacaaaatattaaaaaagaagaaattgaaaatctgcaaaaatatcatgatactatttcacgtccttctcacatatttcgcttatgtaatgatcttgcgtcagcaagtgcagaaattgcccgcggtgaaaccgcaaatagcgtaagttgctatatgagaacaaaaggaatttcagaagaacttgcaactgaatctgtgatgaatctgattgatgaaacctggaagaaaatgaataaagaaaaattaggcggttctctgtttgctaaaccatttgtagaaacggctataaatcttgcgcgtcagtcacattgcacctatcacaatggagatgcgcatacgtctccggatgaacttaccagaaaaagagtgctgagtgtgattaccgaaccgatactgccatttgaacgctaaccgcggaggccggcgcggccgatttaaatcctcagcctgagccataaaaataagaagcctgcatttgcaggcttcttatttttataacagctgtcccgggagaaggctagcaaacgagtgactcgagaacatgtgagcaataaaaataagaagcctgcatttgcaggcttcttatttttatagaccggggacttatcagccaacctgtaggccagcaaaaggccaggaaccgtaaaaaggccgcgttgctggcgtttttccataggctccgcccccctgacgagcatcacaaaaatcgacgctcaagtcagaggtggcgaaacccgacaggactataaagataccaggcgtttccccctggaagctccctcgtgcgctctcctgttccgaccctgccgcttaccggatacctgtccgcctttctcccttcgggaagcgtggcgctttctcatagctcacgctgtaggtatctcagttcggtgtaggtcgttcgctccaagctgggctgtgtgcacgaaccccccgttcagcccgaccgctgcgccttatccggtaactatcgtcttgagtccaacccggtaagacacgacttatcgccactggcagcagccactggtaacaggattagcagagcgaggtatgtaggcggtgctacagagttcttgaagtggtggcctaactacggctacactagaagaacagtatttggtatctgcgctctgctgaagccagttaccttcggaaaaagagttggtagctcttgatccggcaaacaaaccaccgctggtagcggtggtttttttgtttgcaagcagcagattacgcgcagaaaaaaaggatctcaagaagatcctttgatcttttctacggggtctgacgctcagtggaacgaaaactcacgttaagggattttggtcatgagattatcaaaaaggatcttcacctagatccttttaaattaaaaatgaagttttaaatcaatctaaagtatatatgagtaaacttggtctgacagttaccaatgcttaatcagtgaggcacctatctcagcgatctgtctatttcgttcatccatagttgcctgactccccgtcgtgtagataactacgatacgggagggcttaccatctggccccagtgctgcaatgataccgcgagacccacgctcaccggctccagatttatcagcaataaaccagccagccggaagggccgagcgcagaagtggtcctgcaactttatccgcctccatccagtctattaattgttgccgggaagctagagtaagtagttcgccagttaatagtttgcgcaacgttgttgccattgctacaggcatcgtggtgtcacgctcgtcgtttggtatggcttcattcagctccggttcccaacgatcaaggcgagttacatgatcccccatgttgtgcaaaaaagcggttagctccttcggtcctccgatcgttgtcagaagtaagttggccgcagtgttatcactcatggttatggcagcactgcataattctcttactgtcatgccatccgtaagatgcttttctgtgactggtgagtactcaaccaagtcattctgagaatagtgtatgcggcgaccgagttgctcttgcccggcgtcaatacgggataataccgcgccacatagcagaactttaaaagtgctcatcattggaaaacgttcttcggggcgaaaactctcaaggatcttaccgctgttgagatccagttcgatgtaacccactcgtgcacccaactgatcttcagcatcttttactttcaccagcgtttctgggtgagcaaaaacaggaaggcaaaatgccgcaaaaaagggaataagggcgacacggaaatgttgaatactcatactcttcctttttcaatattattgaagcatttatcagggttattgtctcatgagcggatacatatttgaatgtatttagaaaaataaacaaataggggttccgcgcacatttccccgaaaagtgccacctg

SEQ ID NO: 24 - DNA, 15856 bp, artificial sequence
  plasmid BG292
acggtcctgcaggtaatacgactcactatagggataacttaaatttatattttttactttataatatataattgattatagaatccaaattagataggaggaccaggtaaatggagaataattttattgtcaacgaaaacgagaaaagggttttaaagcagatatttaacaactccaatatcagtagaactcaaatttccaagaatttagaactgaataaagcaacaatttcgaacattcttaacaatctaaagcataaaagtttggtaaatgaagttggtgaaggaaattctactaaaagtggtggaagaaaacctatacttctcgaaattaatcaaaagtatgggtattatataagcatggatttgacatatgattctgttgagttaatgtataactattttgatgctacaattctcaaacaagatagttatgaactgaatgataagaatgtaagtagcatattacagatactcaaatctaacataaatgttagcgaaaaatacgacacattatacggtttattagggataagtatatccatacatgggattgtagatgatgaacaaaacatcattaatctaccatttcacaagaatgaaaaaagaacgtttactgatgaacttaagtctttcactaatgtaccagtggttattgaaaatgaggcaaatttaagtgcattatacgagaaaagtttatacatcaattcgaatattaacaacttgatcacattgtctatacataaaggtataggagctggcatcataatcaataagaaactctatagaggtagtaatggagaagctggagaaataggaaagactcttgttttagagtctatcaataacaatgataacaagtactataaaatagaggatatttgtagtcaagacgctttgatacaaaagattaataacagattaggagttacacttacatttaccgaactaatacagtattataacgaaggaaatagtattgtagctcatgaaatcaaacagtttatcaacaaaatgactgtcttaatacacaatcttaatactcagtttaatccagatgcaatatacatcaattgtcccttgattaatgaacttcctaatattctaaacgaaatcaaagaacaattctcttgtttttcacaaggaagtcctatacaattgcatttaaccactaatgttaaacaagctacattattaggtggaacattagcaattatgcagaaaacccttaacataaacaatatccaaatgaatattaaatagttacagcagtctgagttataaaatagatatctcggaccgtctattcttccttatttgagtgggtaccaatgaaatctttcgagctaaatcgatttctggcccactcttttttattttttagtaagcgtttacaaaaaatgaacaatgtgctatattacctctaaagttagtttgtttattaaattaaccaactaaaatgtcgggatccaattaggaggaatctgcgatggaaaagaaggaatttagagttttaataaagtattgttttcttaaaggaaagaatacagtagaagctaagacttggttagataatgaatttccagattctgctcctggtaaaagtacaattatagattggtatgcaaaatttaaaagaggagaaatgtcaacagaagatggagaaagatctggtagaccaaaagaagttgtaactgatgaaaatataaagaagatacataaaatgatattaaatgatagaaagatgaagttaatagaaatagcagaagctttaaaaatatctaaagaaagagttggacatataatacatcaatatttagatatgagaaaattatgtgcaaaatgggttccaagagaattaacttttgatcaaaagcaacagagagtagatgatagtgagagatgtttacaattattaacaagaaatactccagaatttttcagaagatatgtaacaatggatgaaacttggttacatcattatacacctgaaagtaatagacaatcagcagaatggacagctactggagaaccatcacctaaaagaggaaagactcaaaagagtgctggaaaggttatggcatcagtattttgggatgctcatggtataatatttatagattatttagaaaaaggaaaaacaataaattctgattattatatggcattattagaaagattaaaagttgaaatagcagctaaaagaccacatatgaagaagaaaaaagtattatttcatcaagataatgctccttgtcataagtcattaagaactatggcaaagatacatgaattaggttttgaattattaccacatccaccttattcaccagatttagctccttctgatttctttttatttagtgatttaaagagaatgttagcaggaaagaagtttggttgtaatgaagaagttatagcagaaacagaagcttattttgaagcaaaacctaaggaatattatcaaaatggaataaagaagttagaaggtagatataatagatgtatagcattagaaggaaattatgtagaataagaattccttaattaaggagctcgataaaaataagaagcctgcatttgcaggcttcttatttttatggtcatagctgtttcctggcgcgccgccattatttttttgaacaattgacaattcatttcttattttttattaagtgatagtcaaaaggcataacagtgctgaatagaaagaaatttacagaaaagaaaattatagaatttagtatgattaattatactcatttatgaatgtttaattgaatacaaaaaaaaatacttgttatgtattcaattacgggttaaaatatagacaagttgaaaaatttaataaaaaaataagtcctcagctcttatatattaagctaccaacttagtatataagccaaaacttaaatgtgctaccaacacatcaagccgttagagaactctatctatagcaatatttcaaatgtaccgacatacaagagaaacattaactatatatattcaatttatgagattatcttaacagatataaatgtaaattgcaataagtaagatttagaagtttatagcctttgtgtattggaagcagtacgcaaaggcttttttatttgataaaaattagaagtatatttattttttcataattaatttatgaaaatgaaagggggtgagcaaagtgacagaggaaagcagtatcttatcaaataacaaggtattagcaatatcattattgactttagcagtaaacattatgacttttatagtgcttgtagctaagtagtacgaaagggggagctttaaaaagctccttggaatacatagaattcataaattaatttatgaaaagaagggcgtatatgaaaacttgtaaaaattgcaaagagtttattaaagatactgaaatatgcaaaatacattcgttgatgattcatgataaaacagtagcaacctattgcagtaaatacaatgagtcaagatgtttacataaagggaaagtccaatgtattaattgttcaaagatgaaccgatatggatggtgtgccataaaaatgagatgttttacagaggaagaacagaaaaaagaacgtacatgcattaaatattatgcaaggagctttaaaaaagctcatgtaaagaagagtaaaaagaaaaaataatttatttattaatttaatattgagagtgccgacacagtatgcactaaaaaatatatctgtggtgtagtgagccgatacaaaaggatagtcactcgcattttcataatacatcttatgttatgattatgtgtcggtgggacttcacgacgaaaacccacaataaaaaaagagttcggggtagggttaagcatagttgaggcaactaaacaatcaagctaggatatgcagtagcagaccgtaaggtcgttgtttaggtgtgttgtaatacatacgctattaagatgtaaaaatacggataccaatgaagggaaaagtataatttttggatgtagtttgtttgttcatctatgggcaaactacgtccaaagccgtttccaaatctgctaaaaagtatatcctttctaaaatcaaagtcaagtatgaaatcataaataaagtttaattttgaagttattatgatattatgtttttctattaaaataaattaagtatatagaatagtttaataatagtatatacttaatgtgataagtgtctgacagtgtcacagaaaggatgattgttatggattataagcggccggccagtgggcaagttgaaaaattcacaaaaatgtggtataatatctttgttcattagagcgataaacttgaatttgagagggaacttagatggtatttgaaaaaattgataaaaatagttggaacagaaaagagtattttgaccactactttgcaagtgtaccttgtacctacagcatgaccgttaaagtggatatcacacaaataaaggaaaagggaatgaaactatatcctgcaatgctttattatattgcaatgattgtaaaccgccattcagagtttaggacggcaatcaatcaagatggtgaattggggatatatgatgagatgataccaagctatacaatatttcacaatgatactgaaacattttccagcctttggactgagtgtaagtctgactttaaatcatttttagcagattatgaaagtgatacgcaacggtatggaaacaatcatagaatggaaggaaagccaaatgctccggaaaacatttttaatgtatctatgataccgtggtcaaccttcgatggctttaatctgaatttgcagaaaggatatgattatttgattcctatttttactatggggaaatattataaagaagataacaaaattatacttcctttggcaattcaagttcatcacgcagtatgtgacggatttcacatttgccgttttgtaaacgaattgcaggaattgataaatagttaacttcaggtttgtctgtaactaaaaacaagtatttaagcaaaaacatcgtagaaatacggtgttttttgttaccctaagtttaaacgagtgacggaattgtgagcggataacaattccacaggttggctgataagtccccggtctgtaccgttcgtataatgtatgctatacgaagttataggaggttataatgaacgagaaaaatataaaacacagtcaaaactttattacttcaaaacataatatagataaaataatgacaaatataagattaaatgaacatgataatatctttgaaatcggctcaggaaaagggcattttacccttgaattagtacagaggtgtaatttcgtaactgccattgaaatagaccataaattatgcaaaactacagaaaataaacttgttgatcacgataatttccaagttttaaacaaggatatattgcagtttaaatttcctaaaaaccaatcctataaaatatttggtaatataccttataacataagtacggatataatacgcaaaattgtttttgatagtatagctgatgagatttatttaatcgtggaatacgggtttgctaaaagattattaaatacaaaacgctcattggcattatttttaatggcagaagttgatatttctatattaagtatggttccaagagaatattttcatcctaaacctaaagtgaatagctcacttatcagattaaatagaaaaaaatcaagaatatcacacaaagataaacagaagtataattatttcgttatgaaatgggttaacaaagaatacaagaaaatatttacaaaaaatcaatttaacaattccttaaaacatgcaggaattgacgatttaaacaatattagctttgaacaattcttatctcttttcaatagctataaattatttaataagtaagttaagggatgcataaactgcatcccttaacttgtttttcgtgtacctattttttgtgaatcgattatgtcttttgcgcattcgtcgacaattgcatatattgataaaaataataatagtgggtataattaagttgttaggaggttagttagaatgagtagactcgataagtctaaagtgataaattccgcattagaactccttaatgaagttggaattgaaggtctaactaccaggaaattagctcagaaacttggagttgaacaaccaacattgtactggcatgtcaaaaacaaaagagcactcttagatgcattagcaatcgaaatgttagacagacatcatacacacttttgtccattagaaggtgaaagttggcaagactttttgaggaataacgcgaaaagtttcagatgtgctttactatcccatagagatggggctaaagttcacttaggaactagacctacagaaaagcagtatgagacacttgaaaatcagttggcatttctatgtcaacaaggattctcattagagaacgcattatatgctctttcagctgtaggtcatttcacgttaggttgtgttttggaagatcaagaacatcaagttgcaaaagaagagagagaaactcctactacagatagtatgccacctttattacgacaagctatagaactgtttgatcatcaaggagctgaacctgcgtttctctttggattggagttaataatttgcggactagagaaacagcttaagtgtgaaagtggatcttagttagcaccggtcagggtggtgaatgtgaaaccagtaacgttatacgatgtcgcagagtatgccggtgtctcttatcagaccgtttcccgcgtggtgaaccaggccagccacgtttctgcgaaaacgcgggaaaaagtggaagcggcgatggcggagctgaattacattcccaaccgcgtggcacaacaactggcgggcaaacagtcgttgctgattggcgttgccacctccagtctggccctgcacgcgccgtcgcaaattgtcgcggcgattaaatctcgcgccgatcaactgggtgccagcgtggtggtgtcgatggtagaacgaagcggcgtcgaagcctgtaaagcggcggtgcacaatcttctcgcgcaacgcgtcagtgggctgatcattaactatccgctggatgaccaggatgccattgctgtggaagctgcctgcactaatgttccggcgttatttcttgatgtctctgaccagacacccatcaacagtattattttctcccatgaagacggtacgcgactgggcgtggagcatctggtcgcattgggtcaccagcaaatcgcgctgttagcgggcccattaagttctgtctcggcgcgtctgcgtctggctggctggcataaatatctcactcgcaatcaaattcagccgatagcggaacgggaaggcgactggagtgccatgtccggttttcaacaaaccatgcaaatgctgaatgagggcatcgttcccactgcgatgctggttgccaacgatcagatggcgctgggcgcaatgcgcgccattaccgagtccgggctgcgcgttggtgcggacatctcggtagtgggatacgacgataccgaagacagctcatgttatatcccgccgttaaccaccatcaaacaggattttcgcctgctggggcaaaccagcgtggaccgcttgctgcaactctctcagggccaggcggtgaagggcaatcagctgttgcccgtctcactggtgaaaagaaaaaccaccctggcgcccaatacgcaaaccgcctctccccgcgcgttggccgattcattaatgcagctggcacgacaggtttcccgactggaaagcgggcagtgagcgcaacgcaattaatgtaagttagctcactcattaggcaccgggatctcgaccgatgcccttgagagccttcaacccagtcagctccttccggtgggcgcggggcatgactagcatgatcgtgctcctgtcgttgaggacccggctaggctggcggggttgccttactggttagcagaatgaatcaccgatacgcgataacttcgtataatgtatgctatacgaacggtagctcagctagcacccgctcctgaaaatctcgataactcaacctcgctaacggattcactctatcattgatagagtttgaaactctatcattgatagagtataatatctttgttcattagagcgataaacttgaattttaggagggaacttagatgcaaacggaacacgtcattttattgaatgcacagggagttcccacgggtacgctggaaaagtatgccgcacacacggcagacaccctcttacatctcgcgttctccagttggctgtttaatgccaaggggcaattattagttacccgccgcgcactgagcaaaaaagcatggcctggcgtgtggactaactcggtttgtgggcacccacaactgggagaaagcaacgaagacgcagtgatccgccgttgccgttatgagcttggcgtggaaattacgcctcctgaatctatctatcctgactttcgctatcgcgccaccgatccgaatggcattgtggaaaatgaagtgtgtccggtatttgccgcacgcaccaacagtgcgttacagatcaacgatgatgaagtgatggattatcaatggtgtgatttagcagatgtattacacggtattgatgccacgccgtgggcgttcagtccgtggatggtaatgcaggcagccaatagtgaagcaagaaaattgttgtctgctttcgcgcagcacaattaaaaaaccccgacatttgccgggctagcaggaggaattaacatggcaaccactcatttggatgtttgcgccgtggttccggcggccggatttggccgtcgaatgcaaacggaatgtcctaagcaatatctctcaatcggtaatcaaaccattcttgaacactcggtgcatgcgctgctggcgcatccccgggtgaaacgtgtcgtcattgccataagtcctggcgatagccgttttgcacaacttcctctggcgaatcatccgcaaatcaccgttgtagatggcggtgatgagcgtgccgattccgtgctgacaggtttgaaagccgctggcgacgcgcagtgggtattggtgcatgacgccgctcgtccttgtttgcatcaggatgacctcgcgcgattgttggcgttgagcgaaaccagccgcacgggggggatcctcgccgcaccagtgcgcgatactatgaaacgtgccgaaccgggcaaaaatgccattgctcataccgttgatcgcaacggcttatggcacgcgctgacgccgcaatttttccctcgtgagctgttacatgactgtctgacgcgcgctctaaatgaaggcgcgactattaccgacgaagcctcggcgctggaatattgcggattccatcctcagttggtcgaaggccgtgcggataacattaaagtcacgcgcccggaagatttggcactggccgagttttacctcacccgaaccatccatcaggagaatacataatgcgaattggacacggttttgacgtacatgcctttggcggtgaaggcccaattatcattggtggcgtacgcattccttacgaaaaaggattgctggcgcattctgatggcgacgtggcgctccatgcgttgaccgatgcattgcttggcgcggcggcgctgggggatatcggcaagctgttcccggataccgatccggcatttaaaggtgccgatagccgcgagctgctacgcgaagcctggcgtcgtattcaggcgaagggttatacccttggcaacgtcgatgtcactatcatcgctcaggcaccgaagatgttgccgcacattccacaaatgcgcgtgtttattgccgaagatctcggctgccatatggatgatgttaacgtgaaagccactactacggaaaaactgggatttaccggacgtggggaagggattgcctgtgaagcggtggcgctactcattaaggcaacaaaatgataagaagaggaggcagtgtatgagttttgatattgccaaatacccgaccctggcactggtcgactccacccaggagttacgactgttgccgaaagagagtttaccgaaactctgcgacgaactgcgccgctatttactcgacagcgtgagccgttccagcgggcacttcgcctccgggctgggcacggtcgaactgaccgtggcgctgcactatgtctacaacaccccgtttgaccaattgatttgggatgtggggcatcaggcttatccgcataaaattttgaccggacgccgcgacaaaatcggcaccatccgtcagaaaggcggtctgcacccgttcccgtggcgcggcgaaagcgaatatgacgtattaagcgtcgggcattcatcaacctccatcagtgccggaattggtattgcggttgctgccgagaaagaaggcaaaaatcgccgcaccgtctgtgtaatcggcgatggtgcgattaccgcaggcatggcgtttgaagcgatgaatcacgcgggcgatatccgtcctgatatgctggtggttctcaacgacaatgaaatgtcgatttccgaaaatgtcggcgcgctcaacaaccatctggcgcagctgctttccggtaagctttactcttcactgcgcgaaggcgggaaaaaagttttctctggcgttccgccaattaaagagctgctcaaacgcaccgaagaacatattaaaggcatggtagtgcctggcacgttgtttgaagagctgggctttaactacatcggcccggttgacggtcacgatgtgctggggcttatcaccacgcttaagaacatgcgcgacctgaaaggcccgcagttcctgcatatcatgaccaaaaaaggtcgtggttatgaaccggcagaaaaagacccaatcactttccacgccgtgcctaaatttgatccctccagcggttgtttgccgaaaagtagcggcggtttgccgagctattcaaaaatctttggcgactggttgtgtgaaacggcagcgaaagacaacaagctgatggcgattactccggcaatgcgtgaaggttccggcatggtcgagttttcacgtaaattcccggatcgctacttcgacgtggcaattgccgagcaacacgcagtgacctttgccgccggtctggcgattggtgggtacaaacccattgtcgcgatttactccactttcctgcaacgcgcctatgatcaggtgctgcatgacgtggcgattcaaaagctaccggtcctgttcgccattgaccgcgcgggcattgttggtgctgacggtcaaactcaccagggcgcttttgatctctcttacctgcgctgcataccagaaatggtcattatgaccccgagcgatgaaaacgaatgtcgccagatgctctataccggctatcactataacgatggcccgtccgcggtgcgctacccgcgcggcaacgcggttggcgtggaactgacgccgctggaaaaactaccaattggcaaaggcattgtgaagcgtcgtggcgagaaactggcgatccttaactttggtacgctgatgccagaagcggcgaaagtcgccgaatcgctgaacgccacgctggtcgatatgcgttttgtgaaaccgcttgatgaagcgttaattctggaaatggccaccagccatgaagcgctggtcaccgtagaagaaaacgccattatgggcggcgcaggtagcggagtgaacgaagtgctgatggcccatcgtaaaccagtacccgtgctgaacattggtctgccggacttctttattccgcaaggaactcaggaagaaatgcgcgccgaactcggcctcgatgccgccggtatggaagccaaaatcaaggcctggctggcataatccctactccactcctgctatgcttaacaaattattcatagactctaaataattcgagttgcaggaaggcggcaaacgagtgaagcttactgctcatctggtttaaactctcatctgatgcatccagtgaattgataaaaataataatagtgggtataatggaattgtgagcggataacaattccggacaggaggctttataatgtgtgctactagtagtcagtttactcaaatcactgaacataattcgagaagaagtgctaattaccaacctaatctatggaatttcgagtttcttcaaagtttggaaaatgatttgaaggttgaaaaactagaagagaaagctacaaagttagaagaagaagttaggtgtatgatcaatcgagttgatactcaacctttatccttacttgaattaatagatgatgttcaaagattaggacttacctataagtttgagaaagacataatcaaagcgttagagaacatagtactattagacgaaaacaaaaagaataagtctgatttacatgctacagcactttcgtttagacttctaagacaacatggttttgaagttagtcaagatgtatttgagagatttaaagataaagaaggtggattttcaggagagttaaaaggtgatgttcaaggtttgttaagtctgtatgaagcatcttatttgggatttgaaggagaaaacctgttagaagaagctagaacattttcgataactcatctgaaaaataacctcaaagaaggaatcaacacaaaagttgctgaacaagtttctcatgcattagagttaccttatcatcagagattacatcgattagaagcaagatggtttttggacaaatacgaacctaaagaacctcatcatcagctcttgttagaacttgcaaagttagattttaatatggtccaaacattacaccaaaaggaattacaggatctaagtagatggtggactgaaatgggtttagctagtaaacttgactttgttagagacagattaatggaagtgtatttttgggcattaggaatggctcctgatccacaatttggtgaatgtagaaaagctgtaacgaaaatgttcggattagtaacgattatagatgatgtctatgatgtttacggtactttagatgaattgcaactctttacagatgcagttgaaagatgggatgtaaatgcaatcaatacgttaccagattacatgaagttatgctttttagcgttgtataataccgtcaatgatacttcatattccatacttaaggaaaaaggccacaataatctttcctatttaaccaagtcatggagagaattatgtaaggcatttttacaggaagcaaaatggtctaacaataaaataatcccagcattctctaaatatcttgaaaatgcttccgtatcatcttcaggagttgcattattagcaccatcttattttagcgtttgtcaacaacaagaagatatcagtgatcatgctctaagatccttaactgattttcatggattagtcagaagttcatgtgttatattccgtctttgtaatgatttagctacaagtgcagctgaattagaaagaggtgaaactacgaatagtattatatcctatatgcacgaaaatgatggaacaagtgaagaacaagctagagaagaattacgcaagttaattgatgcagaatggaagaaaatgaatcgtgaaagagtatctgatagcacattattacccaaagcttttatggagattgcagtaaatatggctagagtaagtcattgcacatatcagtatggagatggattaggtagacctgattatgctacagaaaatcgcataaaactcttattaatagatcctttcccaatcaatcagctaatgtatgtttagttaaggggcgccacttaatgatttgccagtaaaagagattgtttctagctctcacattcttgcagatataatattgcctagagctgaagttatatatgattatcttaagtaataaaaataagagttaccttaaatggtaactcttatttttttaatgtcgactcatagaattcgtaatcatggtcatagctgtttcctgtgtgaaattgttatccgctcacaattccacacaacatacgagccggaagcgctagcaaacgagtgactcgagaacatgtgagcaataaaaataagaagcctgcatttgcaggcttcttatttttatagaccggggacttatcagccaacctgtaggccagcaaaaggccaggaaccgtaaaaaggccgcgttgctggcgtttttccataggctccgcccccctgacgagcatcacaaaaatcgacgctcaagtcagaggtggcgaaacccgacaggactataaagataccaggcgtttccccctggaagctccctcgtgcgctctcctgttccgaccctgccgcttaccggatacctgtccgcctttctcccttcgggaagcgtggcgctttctcatagctcacgctgtaggtatctcagttcggtgtaggtcgttcgctccaagctgggctgtgtgcacgaaccccccgttcagcccgaccgctgcgccttatccggtaactatcgtcttgagtccaacccggtaagacacgacttatcgccactggcagcagccactggtaacaggattagcagagcgaggtatgtaggcggtgctacagagttcttgaagtggtggcctaactacggctacactagaagaacagtatttggtatctgcgctctgctgaagccagttaccttcggaaaaagagttggtagctcttgatccggcaaacaaaccaccgctggtagcggtggtttttttgtttgcaagcagcagattacgcgcagaaaaaaaggatctcaagaagatcctttgatcttttctacggggtctgacgctcagtggaacgaaaactcacgttaagggattttggtcatgagattatcaaaaaggatcttcacctagatccttttaaattaaaaatgaagttttaaatcaatctaaagtatatatgagtaaacttggtctgacagttaccaatgcttaatcagtgaggcacctatctcagcgatctgtctatttcgttcatccatagttgcctgactccccgtcgtgtagataactacgatacgggagggcttaccatctggccccagtgctgcaatgataccgcgagacccacgctcaccggctccagatttatcagcaataaaccagccagccggaagggccgagcgcagaagtggtcctgcaactttatccgcctccatccagtctattaattgttgccgggaagctagagtaagtagttcgccagttaatagtttgcgcaacgttgttgccattgctacaggcatcgtggtgtcacgctcgtcgtttggtatggcttcattcagctccggttcccaacgatcaaggcgagttacatgatcccccatgttgtgcaaaaaagcggttagctccttcggtcctccgatcgttgtcagaagtaagttggccgcagtgttatcactcatggttatggcagcactgcataattctcttactgtcatgccatccgtaagatgcttttctgtgactggtgagtactcaaccaagtcattctgagaatagtgtatgcggcgaccgagttgctcttgcccggcgtcaatacgggataataccgcgccacatagcagaactttaaaagtgctcatcattggaaaacgttcttcggggcgaaaactctcaaggatcttaccgctgttgagatccagttcgatgtaacccactcgtgcacccaactgatcttcagcatcttttactttcaccagcgtttctgggtgagcaaaaacaggaaggcaaaatgccgcaaaaaagggaataagggcgacacggaaatgttgaatactcatactcttcctttttcaatattattgaagcatttatcagggttattgtctcatgagcggatacatatttgaatgtatttagaaaaataaacaaataggggttccgcgcacatttccccgaaaagtgccacctg

SEQ ID NO: 25 - DNA, 10335 bp, artificial sequence
  plasmid BG178
cggtcctgcaggtaatacgactcactatagggataacttaaatttatattttttactttataatatataattgattatagaatccaaattagataggaggaccaggtaaatggagaataattttattgtcaacgaaaacgagaaaagggttttaaagcagatatttaacaactccaatatcagtagaactcaaatttccaagaatttagaactgaataaagcaacaatttcgaacattcttaacaatctaaagcataaaagtttggtaaatgaagttggtgaaggaaattctactaaaagtggtggaagaaaacctatacttctcgaaattaatcaaaagtatgggtattatataagcatggatttgacatatgattctgttgagttaatgtataactattttgatgctacaattctcaaacaagatagttatgaactgaatgataagaatgtaagtagcatattacagatactcaaatctaacataaatgttagcgaaaaatacgacacattatacggtttattagggataagtatatccatacatgggattgtagatgatgaacaaaacatcattaatctaccatttcacaagaatgaaaaaagaacgtttactgatgaacttaagtctttcactaatgtaccagtggttattgaaaatgaggcaaatttaagtgcattatacgagaaaagtttatacatcaattcgaatattaacaacttgatcacattgtctatacataaaggtataggagctggcatcataatcaataagaaactctatagaggtagtaatggagaagctggagaaataggaaagactcttgttttagagtctatcaataacaatgataacaagtactataaaatagaggatatttgtagtcaagacgctttgatacaaaagattaataacagattaggagttacacttacatttaccgaactaatacagtattataacgaaggaaatagtattgtagctcatgaaatcaaacagtttatcaacaaaatgactgtcttaatacacaatcttaatactcagtttaatccagatgcaatatacatcaattgtcccttgattaatgaacttcctaatattctaaacgaaatcaaagaacaattctcttgtttttcacaaggaagtcctatacaattgcatttaaccactaatgttaaacaagctacattattaggtggaacattagcaattatgcagaaaacccttaacataaacaatatccaaatgaatattaaatagttacagcagtctgagttataaaatagatatctcggaccgtctattcttccttatttgagtgggtaccaatgaaatctttcgagctaaatcgatttctggcccactcttttttattttttagtaagcgtttacaaaaaatgaacaatgtgctatattacctctaaagttagtttgtttattaaattaaccaactaaaatgtcgggatccaattaggaggaatctgcgatggaaaagaaggaatttagagttttaataaagtattgttttcttaaaggaaagaatacagtagaagctaagacttggttagataatgaatttccagattctgctcctggtaaaagtacaattatagattggtatgcaaaatttaaaagaggagaaatgtcaacagaagatggagaaagatctggtagaccaaaagaagttgtaactgatgaaaatataaagaagatacataaaatgatattaaatgatagaaagatgaagttaatagaaatagcagaagctttaaaaatatctaaagaaagagttggacatataatacatcaatatttagatatgagaaaattatgtgcaaaatgggttccaagagaattaacttttgatcaaaagcaaagaagagtagatgatagtaagagatgtttacaattattaacaagaaatactccagaatttttcagaagatatgtaacaatggatgaaacttggttacatcattatacacctgaaagtaatagacaatcagcagaatggacagctactggagaaccatcacctaaaagaggaaagactcaaaagagtgctggaaaggttatggcatcagtattttgggatgctcatggtataatatttatagattatttagaaaaaggaaaaacaataaattctgattattatatggcattattagaaagattaaaagttgaaatagcagctaaaagaccacatatgaagaagaaaaaagtattatttcatcaagataatgctccttgtcataagtcattaagaactatggcaaagatacatgaattaggttttgaattattaccacatccaccttattcaccagatttagctccttctgatttctttttatttagtgatttaaagagaatgttagcaggaaagaagtttggttgtaatgaagaagttatagcagaaacagaagcttattttgaagcaaaacctaaggaatattatcaaaatggaataaagaagttagaaggtagatataatagatgtatagcattagaaggaaattatgtagaataagaattccttaattaaggagctcgataaaaataagaagcctgcatttgcaggcttcttatttttatggtcatagctgtttcctggcgcgcctgcaatcggatgcgattattgaataaaagatatgagagatttatctaatttcttttttcttgtaaaaaaagaaagttcttaaaggttttatagttttggtcgtagagcacacggtttaacgacttaattacgaagtaaataagtctagtgtgttagactttatgaaatctatatacgtttatatatatttattatccgattttttattaaaacgtctcaaaatcgtttctgagacgttttagcgtttatttcgtttagttatcggcataatcgttaaaacaggcgttatcgtagcgtaaaagcccttgagcgtagcgtggctttgcagcgaagatgttgtctgttagattatgaaagccgatgactgaatgaaataataagcgcagcgcccttctatttcggttggaggaggctcaagggagtatgagggaatgaaattccctcatgggtttgattttaaaaattgcttgcaattttgccgagcggtagcgctggaaaatttttgaaaaaaatttggaatttggaaaaaaatggggggaaaggaagcgaattttgcttccgtactacgaccccccattaagtgccgagtgccaatttttgtgccaaaaacgctctatcccaactggctcaagggtttaaggggtttttcaatcgccaacgaatcgccaacgttttcgccaacgttttttataaatctatatttaagtagctttattgttgtttttatgattacaaagtgatacactaactttataaaattatttgattggagttttttaaatggtgatttcagaatcgaaaaaaagagttatgatttctctgacaaaagagcaagataaaaaattaacagatatggcgaaacaaaaaggtttttcaaaatctgcggttgcggcgttagctatagaagaatatgcaagaaaggaatcagaacaaaaaaaataagcgaaagctcgcgtttttagaaggatacgagttttcgctacttgtttttgataaggtaattatatcatggctattaaaaatactaaagctagaaattttggatttttattatatcctgactcaattcctaatgattggaaagaaaaattagagagtttgggcgtatctatggctgtcagtcctttacacgatatggacgaaaaaaaagataaagatacatggaataatagtaatattatacaaaatggaaagcactataaaaaaccacactatcacgttatatatattgcacgaaatcctgtaacaatagaaagcgttaggaacaagattaagcgaaaattggggaatagttcagttgctcatgttgagatacttgattatatcaaaggttcatatgaatatttgactcatgaatcaaaggacgctattgctaagaataaacatatatacgacaaaaaagatattttgaacattaatgattttgatattgacctctatataacacttgatgaaagccaaaaaagagaattgaagaatttacttttagatatagtggatgactataatttggtaaatacaaaagatttaatggcttttattcgccttaggggagcggagtttggaattttaaatacgaatgatgtaaaagatattgtttcaacaaactctagcgcctttagattatggtttgagggcaattatcagtgtggatatagagcaagttatgcaaaggttcttgatgctgaaacgggggaaataaaatgacaaacaaagaaaaagagttatttgctgaaaatgaggaattaaaaaaagaaattaaggacttaaaagagcgtattgaaagatacagagaaatggaagttgaattaagtacaacaatagatttattgagaggagggattattgaataaataaaagccccctgacgaaagtcgaagggggtttttattttggtttgatgttgcgattaatagcaatacaattgcaggccggccagtgggcaagttgaaaaattcacaaaaatgtggtataatatctttgttcattagagcgataaacttgaatttgagagggaacttagatggtatttgaaaaaattgataaaaatagttggaacagaaaagagtattttgaccactactttgcaagtgtaccttgtacctacagcatgaccgttaaagtggatatcacacaaataaaggaaaagggaatgaaactatatcctgcaatgctttattatattgcaatgattgtaaaccgccattcagagtttaggacggcaatcaatcaagatggtgaattggggatatatgatgagatgataccaagctatacaatatttcacaatgatactgaaacattttccagcctttggactgagtgtaagtctgactttaaatcatttttagcagattatgaaagtgatacgcaacggtatggaaacaatcatagaatggaaggaaagccaaatgctccggaaaacatttttaatgtatctatgataccgtggtcaaccttcgatggctttaatctgaatttgcagaaaggatatgattatttgattcctatttttactatggggaaatattataaagaagataacaaaattatacttcctttggcaattcaagttcatcacgcagtatgtgacggatttcacatttgccgttttgtaaacgaattgcaggaattgataaatagttaacttcaggtttgtctgtaactaaaaacaagtatttaagcaaaaacatcgtagaaatacggtgttttttgttaccctaagtttacaggttggctgataagtccccggtctgaagttcctattctctagaaagtataggaacttcttccgacgcttattcgcttcgctcatatttatatagaaaagaagtgaatgcgcaaaagacataatcgctagcgcgtatcggtgattcattctgctaaccagtaaggcaaccccgccagcctagccgggtcctcaacgacaggagcacgatcatgctagtcatgccccgcgcccaccggaaggagctgactgggttgaaggctctcaagggcatcggtcgagatcccggtgcctaatgagtgagctaacttacattaattgcgttgcgctcactgcccgctttccagtcgggaaacctgtcgtgccagctgcattaatgaatcggccaacgcgcggggagaggcggtttgcgtattgggcgccagggtggtttttcttttcaccagtgagacgggcaacagctgattgcccttcaccgcctggccctgagagagttgcagcaagcggtccacgctggtttgccccagcaggcgaaaatcctgtttgatggtggttaacggcgggatataacatgagctgtcttcggtatcgtcgtatcccactaccgagatgtccgcaccaacgcgcagcccggactcggtaatggcgcgcattgcgcccagcgccatctgatcgttggcaaccagcatcgcagtgggaacgatgccctcattcagcatttgcatggtttgttgaaaaccggacatggcactccagtcgccttcccgttccgctatcggctgaatttgattgcgagtgagatatttatgccagccagccagacgcagacgcgccgagacagaacttaatgggcccgctaacagcgcgatttgctggtgacccaatgcgaccagatgctccacgcccagtcgcgtaccgtcttcatgggagaaaataatactgttgatgggtgtctggtcagagacatcaagaaataacgccggaacattagtgcaggcagcttccacagcaatggcatcctggtcatccagcggatagttaatgatcagcccactgacgcgttgcgcgagaagattgtgcaccgccgctttacaggcttcgacgccgcttcgttctaccatcgacaccaccacgctggcacccagttgatcggcgcgagatttaatcgccgcgacaatttgcgacggcgcgtgcagggccagactggaggtggcaacgccaatcagcaacgactgtttgcccgccagttgttgtgccacgcggttgggaatgtaattcagctccgccatcgccgcttccactttttcccgcgttttcgcagaaacgtggctggcctggttcaccacgcgggaaacggtctgataagagacaccggcatactctgcgacatcgtataacgttactggtttcacattcaccaccctgaccggtgctaactaagatccactttcacacttaagctgtttctctagtccgcaaattattaactccaatccaaagagaaacgcaggttcagctccttgatgatcaaacagttctatagcttgtcgtaataaaggtggcatactatctgtagtaggagtttctctctcttcttttgcaacttgatgttcttgatcttccaaaacacaacctaacgtgaaatgacctacagctgaaagagcatataatgcgttctctaatgagaatccttgttgacatagaaatgccaactgattttcaagtgtctcatactgcttttctgtaggtctagttcctaagtgaactttagccccatctctatgggatagtaaagcacatctgaaacttttcgcgttattcctcaaaaagtcttgccaactttcaccttctaatggacaaaagtgtgtatgatgtctgtctaacatttcgattgctaatgcatctaagagtgctcttttgtttttgacatgccagtacaatgttggttgttcaactccaagtttctgagctaatttcctggtagttagaccttcaattccaacttcattaaggagttctaatgcggaatttatcactttagacttatcgagtctactcattctaactaacctcctaacaacttaattatacccactattattatttttatcaatatatgcaattgtcgactcccttaacttacttattaaataatttatagctattgaaaagagataagaattgttcaaagctaatattgtttaaatcgtcaattcctgcatgttttaaggaattgttaaattgattttttgtaaatattttcttgtattctttgttaacccatttcataacgaaataattatacttctgtttatctttgtgtgatattcttgatttttttctatttaatctgataagtgagctattcactttaggtttaggatgaaaatattctcttggaaccatacttaatatagaaatatcaacttctgccattaaaaataatgccaatgagcgttttgtatttaataatcttttagcaaacccgtattccacgattaaataaatctcatcagctatactatcaaaaacaattttgcgtattatatccgtacttatgttataaggtatattaccaaatattttataggattggtttttaggaaatttaaactgcaatatatccttgtttaaaacttggaaattatcgtgatcaacaagtttattttctgtagttttgcataatttatggtctatttcaatggcagttacgaaattacacctctgtactaattcaagggtaaaatgcccttttcctgagccgatttcaaagatattatcatgttcatttaatcttatatttgtcattattttatctatattatgttttgaagtaataaagttttgactgtgttttatatttttctcgttcattataaccctctttattttttcctccttataaaattagtataattatagcacgagctctgataaatatgaacatgatgagtgatcgttaaatttatactgcaatctgatgcgattattgaagttcctattctctagaaagtataggaacttcacggcagtgaattgacagatttgttgaaacggtataatataattaggaggaatattagtttaaacgagtgactcgagaacatgtgagcaataaaaataagaagcctgcatttgcaggcttcttatttttatagaccggggacttatcagccaacctgtaggccagcaaaaggccaggaaccgtaaaaaggccgcgttgctggcgtttttccataggctccgcccccctgacgagcatcacaaaaatcgacgctcaagtcagaggtggcgaaacccgacaggactataaagataccaggcgtttccccctggaagctccctcgtgcgctctcctgttccgaccctgccgcttaccggatacctgtccgcctttctcccttcgggaagcgtggcgctttctcatagctcacgctgtaggtatctcagttcggtgtaggtcgttcgctccaagctgggctgtgtgcacgaaccccccgttcagcccgaccgctgcgccttatccggtaactatcgtcttgagtccaacccggtaagacacgacttatcgccactggcagcagccactggtaacaggattagcagagcgaggtatgtaggcggtgctacagagttcttgaagtggtggcctaactacggctacactagaagaacagtatttggtatctgcgctctgctgaagccagttaccttcggaaaaagagttggtagctcttgatccggcaaacaaaccaccgctggtagcggtggtttttttgtttgcaagcagcagattacgcgcagaaaaaaaggatctcaagaagatcctttgatcttttctacggggtctgacgctcagtggaacgaaaactcacgttaagggattttggtcatgagattatcaaaaaggatcttcacctagatccttttaaattaaaaatgaagttttaaatcaatctaaagtatatatgagtaaacttggtctgacagttaccaatgcttaatcagtgaggcacctatctcagcgatctgtctatttcgttcatccatagttgcctgactccccgtcgtgtagataactacgatacgggagggcttaccatctggccccagtgctgcaatgataccgcgagacccacgctcaccggctccagatttatcagcaataaaccagccagccggaagggccgagcgcagaagtggtcctgcaactttatccgcctccatccagtctattaattgttgccgggaagctagagtaagtagttcgccagttaatagtttgcgcaacgttgttgccattgctacaggcatcgtggtgtcacgctcgtcgtttggtatggcttcattcagctccggttcccaacgatcaaggcgagttacatgatcccccatgttgtgcaaaaaagcggttagctccttcggtcctccgatcgttgtcagaagtaagttggccgcagtgttatcactcatggttatggcagcactgcataattctcttactgtcatgccatccgtaagatgcttttctgtgactggtgagtactcaaccaagtcattctgagaatagtgtatgcggcgaccgagttgctcttgcccggcgtcaatacgggataataccgcgccacatagcagaactttaaaagtgctcatcattggaaaacgttcttcggggcgaaaactctcaaggatcttaccgctgttgagatccagttcgatgtaacccactcgtgcacccaactgatcttcagcatcttttactttcaccagcgtttctgggtgagcaaaaacaggaaggcaaaatgccgcaaaaaagggaataagggcgacacggaaatgttgaatactcatactcttcctttttcaatattattgaagcatttatcagggttattgtctcatgagcggatacatatttgaatgtatttagaaaaataaacaaataggggttccgcgcacatttccccgaaaagtgccacctga

SEQ ID NO: 26 - DNA, 35127 bp, artificial sequence; identical to SEQ ID NO: 1
  plasmid SG193

SEQ ID NO: 27 - DNA, 17510 bp, artificial sequence; identical to SEQ ID NO: 2
  plasmid SG211

SEQ ID NO: 28 - DNA, 14240 bp, artificial sequence; identical to SEQ ID NO: 3
  plasmid SG278

SEQ ID NO: 29 - DNA, 35127 bp, artificial sequence; identical to SEQ ID NO: 4
  plasmid SG323

SEQ ID NO: 30 - DNA, 12647 bp, artificial sequence
  plasmid SG387
aaggccagcaaaaggccaggaaccgtaaaaaggccgcgttgctggcgtttttccataggctccgcccccctgacgagcatcacaaaaatcgacgctcaagtcagaggtggcgaaacccgacaggactataaagataccaggcgtttccccctggaagctccctcgtgcgctctcctgttccgaccctgccgcttaccggatacctgtccgcctttctcccttcgggaagcgtggcgctttctcatagctcacgctgtaggtatctcagttcggtgtaggtcgttcgctccaagctgggctgtgtgcacgaaccccccgttcagcccgaccgctgcgccttatccggtaactatcgtcttgagtccaacccggtaagacacgacttatcgccactggcagcagccactggtaacaggattagcagagcgaggtatgtaggcggtgctacagagttcttgaagtggtggcctaactacggctacactagaagaacagtatttggtatctgcgctctgctgaagccagttaccttcggaaaaagagttggtagctcttgatccggcaaacaaaccaccgctggtagcggtggtttttttgtttgcaagcagcagattacgcgcagaaaaaaaggatctcaagaagatcctttgatcttttctacggggtctgacgctcagtggaacgaaaactcacgttaagggattttggtcatgagattatcaaaaaggatcttcacctagatccttttaaattaaaaatgaagttttaaatcaatctaaagtatatatgagtaaacttggtctgacagctcttcctttttcaatattattgaagcatttatcagggttattgtctcatgagcggatacatatttgaatgtatttagaaaaataaacaaataggggttccgcgcacatttccccgaaaagtgccacctgacggtcctgcatcagctcttatatattaagctaccaacttagtatataagccaaaacttaaatgtgctaccaacacatcaagccgttagagaactctatctatagcaatatttcaaatgtaccgacatacaagagaaacattaactatatatattcaatttatgagattatcttaacagatataaatgtaaattgcaataagtaagatttagaagtttatagcctttgtgtattggaagcagtacgcaaaggcttttttatttgataaaaattagaagtatatttattttttcataattaatttatgaaaatgaaagggggtgagcaaagtgacagaggaaagcagtatcttatcaaataacaaggtattagcaatatcattattgactttagcagtaaacattatgacttttatagtgcttgtagctaagtagtacgaaagggggagctttaaaaagctccttggaatacatagaattcataaattaatttatgaaaagaagggcgtatatgaaaacttgtaaaaattgcaaagagtttattaaagatactgaaatatgcaaaatacattcgttgatgattcatgataaaacagtagcaacctattgcagtaaatacaatgagtcaagatgtttacataaagggaaagtccaatgtattaattgttcaaagatgaaccgatatggatggtgtgccataaaaatgagatgttttacagaggaagaacagaaaaaagaacgtacatgcattaaatattatgcaaggagctttaaaaaagctcatgtaaagaagagtaaaaagaaaaaataatttatttattaatttaatattgagagtgccgacacagtatgcactaaaaaatatatctgtggtgtagtgagccgatacaaaaggatagtcactcgcattttcataatacatcttatgttatgattatgtgtcggtgggacttcacgacgaaaacccacaataaaaaaagagttcggggtagggttaagcatagttgaggcaactaaacaatcaagctaggatatgcagtagcagaccgtaaggtcgttgtttaggtgtgttgtaatacatacgctattaagatgtaaaaatacggataccaatgaagggaaaagtataatttttggatgtagtttgtttgttcatctatgggcaaactacgtccaaagccgtttccaaatctgctaaaaagtatatcctttctaaaatcaaagtcaagtatgaaatcataaataaagtttaattttgaagttattatgatattatgtttttctattaaaataaattaagtatatagaatagtttaataatagtatatacttaatgtgataagtgtctgacagtgtcacagaaaggatgattgttatggattataagcggccggccagtgggcaagttgaaaaattcacaaaaatgtggtataatatctttgttcattagagcgataaacttgaatttgagagggaacttagatggtatttgaaaaaattgataaaaatagttggaacagaaaagagtattttgaccactactttgcaagtgtaccttgtacctacagcatgaccgttaaagtggatatcacacaaataaaggaaaagggaatgaaactatatcctgcaatgctttattatattgcaatgattgtaaaccgccattcagagtttaggacggcaatcaatcaagatggtgaattggggatatatgatgagatgataccaagctatacaatatttcacaatgatactgaaacattttccagcctttggactgagtgtaagtctgactttaaatcatttttagcagattatgaaagtgatacgcaacggtatggaaacaatcatagaatggaaggaaagccaaatgctccggaaaacatttttaatgtatctatgataccgtggtcaaccttcgatggctttaatctgaatttgcagaaaggatatgattatttgattcctatttttactatggggaaatattataaagaagataacaaaattatacttcctttggcaattcaagttcatcacgcagtatgtgacggatttcacatttgccgttttgtaaacgaattgcaggaattgataaatagttaacttcaggtttgtctgtaactaaaaacaagtatttaagcaaaaacatcgtagaaatacggtgttttttgttaccctaagtttgttaagggatgcataaactgcatcccttaacttgtttttcgtgtacctattttttgtgaatcgattatgtcttttgcgcattcgtcgacaattgcatatattgataaaaataataatagtgggtataattaagttgttaggaggttagttagagtgaaaccagtaacgttatacgatgtcgcagagtatgccggtgtctcttatcagaccgtttcccgcgtggtgaaccaggccagccacgtttctgcgaaaacgcgggaaaaagtggaagcggcgatggcggagctgaattacattcccaaccgcgtggcacaacaactggcgggcaaacagtcgttgctgattggcgttgccacctccagtctggccctgcacgcgccgtcgcaaattgtcgcggcgattaaatctcgcgccgatcaactgggtgccagcgtggtggtgtcgatggtagaacgaagcggcgtcgaagcctgtaaagcggcggtgcacaatcttctcgcgcaacgcgtcagtgggctgatcattaactatccgctggatgaccaggatgccattgctgtggaagctgcctgcactaatgttccggcgttatttcttgatgtctctgaccagacacccatcaacagtattattttctcccatgaagacggtacgcgactgggcgtggagcatctggtcgcattgggtcaccagcaaatcgcgctgttagcgggcccattaagttctgtctcggcgcgtctgcgtctggctggctggcataaatatctcactcgcaatcaaattcagccgatagcggaacgggaaggcgactggagtgccatgtccggttttcaacaaaccatgcaaatgctgaatgagggcatcgttcccactgcgatgctggttgccaacgatcagatggcgctgggcgcaatgcgcgccattaccgagtccgggctgcgcgttggtgcggacatctcggtagtgggatacgacgataccgaagacagctcatgttatatcccgccgttaaccaccatcaaacaggattttcgcctgctggggcaaaccagcgtggaccgcttgctgcaactctctcagggccaggcggtgaagggcaatcagctgttgcccgtctcactggtgaaaagaaaaaccaccctggcgcccaatacgcaaaccgcctctccccgcgcgttggccgattcattaatgcagctggcacgacaggtttcccgactggaaagcgggcagtgagcgcaacgcaattaatgtaagttagctcactcattaggcaccgggatctcgaccgatgcccttgagagccttcaacccagtcagctccttccggtgggcgcggggcatgactagcatgatcgtgctcctgtcgttgaggacccggctaggctggcggggttgccttactggttagcagaatgaatcaccgatacgcggctcagctagcacccggaattgtgagcggataacaattccttggaattgtgagcggataacaattataattaagttgttaggaggttagaatgaaaaattgtgtcatcgtcagtgcggtacgtactgctatcggtagttttaacggttcactcgcttccaccagcgccatcgacctgggggcgacagtaattaaagccgccattgaacgtgcaaaaatcgattcacaacacgttgatgaagtgattatgggtaacgtgttacaagccgggctggggcaaaatccggcgcgtcaggcactgttaaaaagcgggctggcagaaacggtgtgcggattcacggtcaataaagtatgtggttcgggtcttaaaagtgtggcgcttgccgcccaggccattcaggcaggtcaggcgcagagcattgtggcggggggtatggaaaatatgagtttagccccctacttactcgatgcaaaagcacgctctggttatcgtcttggagacggacaggtttatgacgtaatcctgcgcgatggcctgatgtgcgccacccatggttatcatatggggattaccgccgaaaacgtggctaaagagtacggaattacccgtgaaatgcaggatgaactggcgctacattcacagcgtaaagcggcagccgcaattgagtccggtgcttttacagccgaaatcgtcccggtaaatgttgtcactcgaaagaaaaccttcgtcttcagtcaagacgaattcccgaaagcgaattcaacggctgaagcgttaggtgcattgcgcccggccttcgataaagcaggaacagtcaccgctgggaacgcgtctggtattaacgacggtgctgccgctctggtgattatggaagaatctgcggcgctggcagcaggccttacccccctggctcgcattaaaagttatgccagcggtggcgtgccccccgcattgatgggtatggggccagtacctgccacgcaaaaagcgttacaactggcggggctgcaactggcggatattgatctcattgaggctaatgaagcatttgctgcacagttccttgccgttgggaaaaacctgggctttgattctgagaaagtgaatgtcaacggcggggccatcgcgctcgggcatcctatcggtgccagtggtgctcgtattctggtcacactattacatgccatgcaggcacgcgataaaacgctggggctggcaacactgtgcattggcggcggtcagggaattgcgatggtgattgaacggttgaattaatagggaggtctgtttaatgaaaaaggtatgtgttataggtgcaggtactatgggttcaggaattgctcaggcatttgcagctaaaggatttgaagtagtattaagagatattaaagatgaatttgttgatagaggattagattttatcaataaaaatctttctaaattagttaaaaaaggaaagatagaagaagctactaaagttgaaatcttaactagaatttccggaacagttgaccttaatatggcagctgattgcgatttagttatagaagcagctgttgaaagaatggatattaaaaagcagatttttgctgacttagacaatatatgcaagccagaaacaattcttgcatcaaatacatcatcactttcaataacagaagtggcatcagcaactaaaagacctgataaggttataggtatgcatttctttaatccagctcctgttatgaagcttgtagaggtaataagaggaatagctacatcacaagaaacttttgatgcagttaaagagacatctatagcaataggaaaagatcctgtagaagtagcagaagcaccaggatttgttgtaaatagaatattaataccaatgattaatgaagcagttggtatattagcagaaggaatagcttcagtagaagacatagataaagctatgaaacttggagctaatcacccaatgggaccattagaattaggtgattttataggtcttgatatatgtcttgctataatggatgttttatactcagaaactggagattctaagtatagaccacatacattacttaagaagtatgtaagagcaggatggcttggaagaaaatcaggaaaaggtttctacgattattcaaaataagtttacaagaatccctttaggaggattagtcatggaactaaacaatgtcatccttgaaaaggaaggtaaagttgctgtagttaccattaacagacctaaagcattaaatgcgttaaatagtgatacactaaaagaaatggattatgttataggtgaaattgaaaatgatagcgaagtacttgcagtaattttaactggagcaggagaaaaatcatttgtagcaggagcagatatttctgagatgaaggaaatgaataccattgaaggtagaaaattcgggatacttggaaataaagtgtttagaagattagaacttcttgaaaagcctgtaatagcagctgttaatggttttgctttaggaggcggatgcgaaatagctatgtcttgtgatataagaatagcttcaagcaacgcaagatttggtcaaccagaagtaggtctcggaataacacctggttttggtggtacacaaagactttcaagattagttggaatgggcatggcaaagcagcttatatttactgcacaaaatataaaggcagatgaagcattaagaatcggacttgtaaataaggtagtagaacctagtgaattaatgaatacagcaaaagaaattgcaaacaaaattgtgagcaatgctccagtagctgttaagttaagcaaacaggctattaatagaggaatgcagtgtgatattgatactgctttagcatttgaatcagaagcatttggagaatgcttttcaacagaggatcaaaaggatgcaatgacagctttcatagagaaaagaaaaattgaaggcttcaaaaatagataggaggtaagtttataggaggaattccatatgatatggaaacggaaaatcaccctggaagcactgaatgctatgggtgaaggaaacatggtggggttcctggatattcgctttgaacatattggtgatgacacccttgaagcgacaatgccagtagactcgcggacaaagcagcctttcgggttgctgcatggaggagcatccgtggtactggccgaaagtatcggttccgttgccggttatttatgtaccgaaggtgagcaaaaagtggttggtctggaaatcaatgctaaccacgtccgctcggcacgagaagggcgggtgcgcggcgtatgcaaaccgttgcatctcggttcgcgtcaccaggtctggcagattgaaatcttcgatgagaaagggcgtttgtgctgttcgtcacgattgacgaccgccattttgtgaatttacacgatcgacgtgctcagctagcacccggaattgtgagcggataacaattccttggaattgtgagcggataacaattataattaagttgttaggaggttagaatgaaagttacaaatcaaaaagaactaaaacaaaagctaaatgaattgagagaagcgcaaaagaagtttgcaacctatactcaagagcaagttgataaaatttttaaacaatgtgccatagccgcagctaaagaaagaataaacttagctaaattagcagtagaagaaacaggaataggtcttgtagaagataaaattataaaaaatcattttgcagcagaatatatatacaataaatataaaaatgaaaaaacttgtggcataatagaccatgacgattctttaggcataacaaaggttgctgaaccaattggaattgttgcagccatagttcctactactaatccaacttccacagcaattttcaaatcattaatttctttaaaaacaagaaacgcaatattcttttcaccacatccacgtgcaaaaaaatctacaattgctgcagcaaaattaattttagatgcagctgttaaagcaggagcacctaaaaatataataggctggatagatgagccatcaatagaactttctcaagatttgatgagtgaagctgatataatattagcaacaggaggtccttcaatggttaaagcggcctattcatctggaaaacctgcaattggtgttggagcaggaaatacaccagcaataatagatgagagtgcagatatagatatggcagtaagctccataattttatcaaagacttatgacaatggagtaatatgcgcttctgaacaatcaatattagttatgaattcaatatacgaaaaagttaaagaggaatttgtaaaacgaggatcatatatactcaatcaaaatgaaatagctaaaataaaagaaactatgtttaaaaatggagctattaatgctgacatagttggaaaatctgcttatataattgctaaaatggcaggaattgaagttcctcaaactacaaagatacttataggcgaagtacaatctgttgaaaaaagcgagctgttctcacatgaaaaactatcaccagtacttgcaatgtataaagttaaggattttgatgaagctctaaaaaaggcacaaaggctaatagaattaggtggaagtggacacacgtcatctttatatatagattcacaaaacaataaggataaagttaaagaatttggattagcaatgaaaacttcaaggacatttattaacatgccttcttcacagggagcaagcggagatttatacaattttgcgatagcaccatcatttactcttggatgcggcacttggggaggaaactctgtatcgcaaaatgtagagcctaaacatttattaaatattaaaagtgttgctgaaagaagggaaaatatgctttggtttaaagtgccacaaaaaatatattttaaatatggatgtcttagatttgcattaaaagaattaaaagatatgaataagaaaagagcctttatagtaacagataaagatctttttaaacttggatatgttaataaaataacaaaggtactagatgagatagatattaaatacagtatatttacagatattaaatctgatccaactattgattcagtaaaaaaaggtgctaaagaaatgcttaactttgaacctgatactataatctctattggtggtggatcgccaatggatgcagcaaaggttatgcacttgttatatgaatatccagaagcagaaattgaaaatctagctataaactttatggatataagaaagagaatatgcaatttccctaaattaggtacaaaggcgatttcagtagctattcctacaactgctggtaccggttcagaggcaacaccttttgcagttataactaatgatgaaacaggaatgaaataccctttaacttcttatgaattgaccccaaacatggcaataatagatactgaattaatgttaaatatgcctagaaaattaacagcagcaactggaatagatgcattagttcatgctatagaagcatatgtttcggttatggctacggattatactgatgaattagccttaagagcaataaaaatgatatttaaatatttgcctagagcctataaaaatgggactaacgacattgaagcaagagaaaaaatggcacatgcctctaatattgcggggatggcatttgcaaatgctttcttaggtgtatgccattcaatggctcataaacttggggcaatgcatcacgttccacatggaattgcttgtgctgtattaatagaagaagttattaaatataacgctacagactgtccaacaaagcaaacagcattccctcaatataaatctcctaatgctaagagaaaatatgctgaaattgcagagtatttgaatttaaagggtactagcgataccgaaaaggtaacagccttaatagaagctatttcaaagttaaagatagatttgagtattccacaaaatataagtgccgctggaataaataaaaaagatttttataatacgctagataaaatgtcagagcttgcttttgatgaccaatgtacaacagctaatcctaggtatccacttataagtgaacttaaggatatctatataaaatcattttaaatgctaaaggaggagacaatgagcaatatggaatcgacccgcatgctgcggcagccgatacagttgttgcaggggcacaagggaccggtcacggcctcgcgccaccgccgcaatgccgtggtgtatgcactgctgtgcctgctggcgctgctaccggtggccaccggccagtcggcggcgtggcaggccgccgggctggggctgttcatgcccggcgccggtttcctggcgctgggtggcgcctgggcgttgctgttcccgctgacggtgttcgtcttctggctggcggtcattgcctggttctggtcgggcatggtggtggcgccgctgaccctctggctgggcaccgccgcgctggccggctggctggcgggcgaggcgatctggccgccggcggtgtatctggcgccggccgccgccgccgccaccttcctgttcttccagtatcgcggcgccaagcggcgggccaaggaccgcgagcacttcaagttccgccaaagtttcttcgccgagtcgctggcggaggtgcaccagcgcgccgccaccgaaccggagccgggcgagcgcgaactgacgccggaccagttgcagggcgtgcgctacctgctcgagctggccttgcagccggtcggccagtacaagggctacaccatcatcgaccagttccagccggccgccctgcgctaccagctcaaccacatcggcttcgcgctgggcatggtgcaagggcattacacgcccaacttccagggctatctgggccaggcgcagcgcaacgtgatcgacacttaccgcgagcgcaaggtgtggggctactgggtgtacgagtcgatgtgggggcatttcaacttctccgacttcgatcccgcccgcaaggacaacatcatgctcaccggctggtacggcatgcatgtgggccagtacatgctcaatgccggcgacacccgctacagccagcccggcagcctgagcttccgcctcaacgacaagacctgctaccaccacgacatccattccatcaaccagtcggtgcgcgagaacttccagagttcggacttctgcctgtatccgtgcgagccgaactgggtgtacccggtctgcaacatgtacggcatgtcctcgctggcggtgtatgacacgctgttcgagcgccgcgacaccgcccaggtgctgcccaagtggctgcacatgctggacaccgagttcaccgaccagaaaggctcgctggtcggcttgcgctcatactggaccgggctggaaatgccgttctacaccggcgaggcgggcttcgccttcttcgccaacatcttctcgaccgatctggcgcgcaagctgtgggcggtggggcgcaaggaattgtcgatgtgcctgacgcaggacgccgagggccagacgcggctgactctgccgaaggaggcgctggccttcttcgacaccatcgacgccggcaactaccggccgggcaagctgttcgcctatgtggcggtgcagatgtgcgcgcgcgagttcggcgacgacgaactggccgaggcggcacgccgctcgatggaccaggattgcggcccggtggtcgagaacggcgtggcgcgctacaccaagggctcgacgctggccaacatctggggcgtggagggacggctgatgcgcaccggcgatttccgcaacagcttcgtcaaggggccgccgtcgtcggtgttcgacggtccgctgctgggtgatgcgcgctatccggaaatcctggtggcgaaggccttcagccgtggcgacgacctggaactggtgctgtacccgggggccggcgacgggccgcagacgctgggcttcgaacgcctcaagcccggcgtccgctatgtggtcgagggcgccgccagtggtgagttcaccgccgacgcggatggccgtgcgtcgctcgcggtcacgctcagcgggcgcactgcgctgcacatcaagccgggccactgatactatcataaaaataagaagcctgcatttgcaggcttcttatttttat

SEQ ID NO: 31 - DNA, 15638 bp, artificial sequence
  plasmid SG411
aaggccagcaaaaggccaggaaccgtaaaaaggccgcgttgctggcgtttttccataggctccgcccccctgacgagcatcacaaaaatcgacgctcaagtcagaggtggcgaaacccgacaggactataaagataccaggcgtttccccctggaagctccctcgtgcgctctcctgttccgaccctgccgcttaccggatacctgtccgcctttctcccttcgggaagcgtggcgctttctcatagctcacgctgtaggtatctcagttcggtgtaggtcgttcgctccaagctgggctgtgtgcacgaaccccccgttcagcccgaccgctgcgccttatccggtaactatcgtcttgagtccaacccggtaagacacgacttatcgccactggcagcagccactggtaacaggattagcagagcgaggtatgtaggcggtgctacagagttcttgaagtggtggcctaactacggctacactagaagaacagtatttggtatctgcgctctgctgaagccagttaccttcggaaaaagagttggtagctcttgatccggcaaacaaaccaccgctggtagcggtggtttttttgtttgcaagcagcagattacgcgcagaaaaaaaggatctcaagaagatcctttgatcttttctacggggtctgacgctcagtggaacgaaaactcacgttaagggattttggtcatgagattatcaaaaaggatcttcacctagatccttttaaattaaaaatgaagttttaaatcaatctaaagtatatatgagtaaacttggtctgacagctcttcctttttcaatattattgaagcatttatcagggttattgtctcatgagcggatacatatttgaatgtatttagaaaaataaacaaataggggttccgcgcacatttccccgaaaagtgccacctgacggtcctgcatcagctcttatatattaagctaccaacttagtatataagccaaaacttaaatgtgctaccaacacatcaagccgttagagaactctatctatagcaatatttcaaatgtaccgacatacaagagaaacattaactatatatattcaatttatgagattatcttaacagatataaatgtaaattgcaataagtaagatttagaagtttatagcctttgtgtattggaagcagtacgcaaaggcttttttatttgataaaaattagaagtatatttattttttcataattaatttatgaaaatgaaagggggtgagcaaagtgacagaggaaagcagtatcttatcaaataacaaggtattagcaatatcattattgactttagcagtaaacattatgacttttatagtgcttgtagctaagtagtacgaaagggggagctttaaaaagctccttggaatacatagaattcataaattaatttatgaaaagaagggcgtatatgaaaacttgtaaaaattgcaaagagtttattaaagatactgaaatatgcaaaatacattcgttgatgattcatgataaaacagtagcaacctattgcagtaaatacaatgagtcaagatgtttacataaagggaaagtccaatgtattaattgttcaaagatgaaccgatatggatggtgtgccataaaaatgagatgttttacagaggaagaacagaaaaaagaacgtacatgcattaaatattatgcaaggagctttaaaaaagctcatgtaaagaagagtaaaaagaaaaaataatttatttattaatttaatattgagagtgccgacacagtatgcactaaaaaatatatctgtggtgtagtgagccgatacaaaaggatagtcactcgcattttcataatacatcttatgttatgattatgtgtcggtgggacttcacgacgaaaacccacaataaaaaaagagttcggggtagggttaagcatagttgaggcaactaaacaatcaagctaggatatgcagtagcagaccgtaaggtcgttgtttaggtgtgttgtaatacatacgctattaagatgtaaaaatacggataccaatgaagggaaaagtataatttttggatgtagtttgtttgttcatctatgggcaaactacgtccaaagccgtttccaaatctgctaaaaagtatatcctttctaaaatcaaagtcaagtatgaaatcataaataaagtttaattttgaagttattatgatattatgtttttctattaaaataaattaagtatatagaatagtttaataatagtatatacttaatgtgataagtgtctgacagtgtcacagaaaggatgattgttatggattataagcggccggccagtgggcaagttgaaaaattcacaaaaatgtggtataatatctttgttcattagagcgataaacttgaatttgagagggaacttagatggtatttgaaaaaattgataaaaatagttggaacagaaaagagtattttgaccactactttgcaagtgtaccttgtacctacagcatgaccgttaaagtggatatcacacaaataaaggaaaagggaatgaaactatatcctgcaatgctttattatattgcaatgattgtaaaccgccattcagagtttaggacggcaatcaatcaagatggtgaattggggatatatgatgagatgataccaagctatacaatatttcacaatgatactgaaacattttccagcctttggactgagtgtaagtctgactttaaatcatttttagcagattatgaaagtgatacgcaacggtatggaaacaatcatagaatggaaggaaagccaaatgctccggaaaacatttttaatgtatctatgataccgtggtcaaccttcgatggctttaatctgaatttgcagaaaggatatgattatttgattcctatttttactatggggaaatattataaagaagataacaaaattatacttcctttggcaattcaagttcatcacgcagtatgtgacggatttcacatttgccgttttgtaaacgaattgcaggaattgataaatagttaacttcaggtttgtctgtaactaaaaacaagtatttaagcaaaaacatcgtagaaatacggtgttttttgttaccctaagtttgttaagggatgcataaactgcatcccttaacttgtttttcgtgtacctattttttgtgaatcgattatgtcttttgcgcattcgtcgacaattgcatatattgataaaaataataatagtgggtataattaagttgttaggaggttagttagagtgaaaccagtaacgttatacgatgtcgcagagtatgccggtgtctcttatcagaccgtttcccgcgtggtgaaccaggccagccacgtttctgcgaaaacgcgggaaaaagtggaagcggcgatggcggagctgaattacattcccaaccgcgtggcacaacaactggcgggcaaacagtcgttgctgattggcgttgccacctccagtctggccctgcacgcgccgtcgcaaattgtcgcggcgattaaatctcgcgccgatcaactgggtgccagcgtggtggtgtcgatggtagaacgaagcggcgtcgaagcctgtaaagcggcggtgcacaatcttctcgcgcaacgcgtcagtgggctgatcattaactatccgctggatgaccaggatgccattgctgtggaagctgcctgcactaatgttccggcgttatttcttgatgtctctgaccagacacccatcaacagtattattttctcccatgaagacggtacgcgactgggcgtggagcatctggtcgcattgggtcaccagcaaatcgcgctgttagcgggcccattaagttctgtctcggcgcgtctgcgtctggctggctggcataaatatctcactcgcaatcaaattcagccgatagcggaacgggaaggcgactggagtgccatgtccggttttcaacaaaccatgcaaatgctgaatgagggcatcgttcccactgcgatgctggttgccaacgatcagatggcgctgggcgcaatgcgcgccattaccgagtccgggctgcgcgttggtgcggacatctcggtagtgggatacgacgataccgaagacagctcatgttatatcccgccgttaaccaccatcaaacaggattttcgcctgctggggcaaaccagcgtggaccgcttgctgcaactctctcagggccaggcggtgaagggcaatcagctgttgcccgtctcactggtgaaaagaaaaaccaccctggcgcccaatacgcaaaccgcctctccccgcgcgttggccgattcattaatgcagctggcacgacaggtttcccgactggaaagcgggcagtgagcgcaacgcaattaatgtaagttagctcactcattaggcaccgggatctcgaccgatgcccttgagagccttcaacccagtcagctccttccggtgggcgcggggcatgactagcatgatcgtgctcctgtcgttgaggacccggctaggctggcggggttgccttactggttagcagaatgaatcaccgatacgcggctcagctagcacccggaattgtgagcggataacaattccttggaattgtgagcggataacaattataattaagttgttaggaggttagaatgagtctgaatttccttgattttgaacagccgattgcagagctggaagcgaaaatcgattctctgactgcggttagccgtcaggatgagaaactggatattaacatcgatgaagaagtgcatcgtctgcgtgaaaaaagcgtagaactgacacgtaaaatcttcgccgatctcggtgcatggcagattgcgcaactggcacgccatccacagcgtccttataccctggattacgttcgcctggcatttgatgaatttgacgaactggctggcgaccgcgcgtatgcagacgataaagctatcgtcggtggtatcgcccgtctcgatggtcgtccggtgatgatcattggtcatcaaaaaggtcgtgaaaccaaagaaaaaattcgccgtaactttggtatgccagcgccagaaggttaccgcaaagcactgcgtctgatgcaaatggctgaacgctttaagatgccaatcatcacctttatcgacaccccgggggcttatccgggcgtgggcgcagaagagcgcggtcagtctgaagccattgcacgcaacctgcgtgaaatgtctcgccttagcgtaccgactatttgtaccgttatcggtgaaggtggttctggcggcgcgctggcgattggcgtgggcgataaagtgaatatgctgcaatacagcacctattccgttatctcgccggaaggttgtgcgtccattctgtggaagagcgctgataaagcgccgctggcggctgaagcgatgggtatcatcgctccgcgtctgaaagaactaaaactgatcgactccatcatcccagaaccgctgggtggtgctcaccgtaacccggaagcgatggcggcatcgttgaaagcgcaactgttggcggatctggccgatctcgacgtgttaagcactgaagatttaaaaaatcgtcgttatcagcgcctgatgagctacggttacgcgtaataaggaggaacccactcatggatattcgtaagattaaaaaactgatcgagctggttgaagaatcaggcatctccgaactggaaatttctgaaggcgaagagtcagtacgcattagccgtgcagctcctgccgcaagtttccctgtgatgcaacaagcttacgctgcaccaatgatgcagcagccagctcaatctaacgcagccgctccggcgaccgttccttccatggaagcgccagcagcagcggaaatcagtggtcacatcgtacgttccccgatggttggtactttctaccgcaccccaagcccggacgcaaaagcgttcatcgaagtgggtcagaaagtcaacgtgggcgataccctgtgcatcgttgaagccatgaaaatgatgaaccagatcgaagcggacaaatccggtaccgtgaaagcaattctggtcgaaagtggacaaccggtagaatttgacgagccgctggtcgtcatcgagtaacgaggcgaacatgctggataaaattgttattgccaaccgcggcgagattgcattgcgtattcttcgtgcctgtaaagaactgggcatcaagactgtcgctgtgcactccagcgcggatcgcgatctaaaacacgtattactggcagatgaaacggtctgtattggccctgctccgtcagtaaaaagttatctgaacatcccggcaatcatcagcgccgctgaaatcaccggcgcagtagcaatccatccgggttacggcttcctctccgagaacgccaactttgccgagcaggttgaacgctccggctttatcttcattggcccgaaagcagaaaccattcgcctgatgggcgacaaagtatccgcaatcgcggcgatgaaaaaagcgggcgtcccttgcgtaccgggttctgacggcccgctgggcgacgatatggataaaaaccgtgccattgctaaacgcattggttatccggtgattatcaaagcctccggcggcggcggcggtcgcggtatgcgcgtagtgcgcggcgacgctgaactggcacaatccatctccatgacccgtgcggaagcgaaagctgctttcagcaacgatatggtttacatggagaaatacctggaaaatcctcgccacgtcgagattcaggtactggctgacggtcagggcaacgctatctatctggcggaacgtgactgctccatgcaacgccgccaccagaaagtggtcgaagaagcgccagcaccgggcattaccccggaactgcgtcgctacatcggcgaacgttgcgctaaagcgtgtgttgatatcggctatcgcggtgcaggtactttcgagttcctgttcgaaaacggcgagttctatttcatcgaaatgaacacccgtattcaggtagaacacccggttacagaaatgatcaccggcgttgacctgatcaaagaacagctgcgtatcgctgccggtcaaccgctgtcgatcaagcaagaagaagttcacgttcgcggccatgcggtggaatgtcgtatcaacgccgaagatccgaacaccttcctgccaagtccgggcaaaatcacccgtttccacgcacctggcggttttggcgtacgttgggagtctcatatctacgcgggctacaccgtaccgccgtactatgactcaatgatcggtaagctgatttgctacggtgaaaaccgtgacgtggcgattgcccgcatgaagaatgcgctgcaggagctgatcatcgacggtatcaaaaccaacgttgatctgcagatccgcatcatgaatgacgagaacttccagcatggtggcactaacatccactatctggagaaaaaactcggtcttcaggaaaaataatataggaggatataacatgagctggattgaacgaattaaaagcaacattactcccacccgcaaggcgagcattcctgaaggggtgtggactaagtgtgatagctgcggtcaggttttataccgcgctgagctggaacgtaatcttgaggtctgtccgaagtgtgaccatcacatgcgtatgacagcgcgtaatcgcctgcatagcctgttagatgaaggaagccttgtggagctgggtagcgagcttgagccgaaagatgtgctgaagtttcgtgactccaagaagtataaagaccgtctggcatctgcgcagaaagaaaccggcgaaaaagatgcgctggtggtgatgaaaggcactctgtatggaatgccggttgtcgctgcggcattcgagttcgcctttatgggcggttcaatggggtctgttgtgggtgcacgtttcgtgcgtgccgttgagcaggcgctggaagataactgcccgctgatctgcttctccgcctctggtggcgcacgtatgcaggaagcactgatgtcgctgatgcagatggcgaaaacctctgcggcactggcaaaaatgcaggagcgcggcttgccgtacatctccgtgctgaccgacccgacgatgggcggtgtttctgcaagtttcgccatgctgggcgatctcaacatcgctgaaccgaaagcgttaatcggctttgccggtccgcgtgttatcgaacagaccgttcgcgaaaaactgccgcctggattccagcgcagtgaattcctgatcgagaaaggcgcgatcgacatgatcgtccgtcgtccggaaatgcgcctgaaactggcgagtattctggcgaagttgatgaatctgccagcgccgaatcctgaagcgccgcgtgaaggcgtagtggtacccccggtaccggatcaggaacctgaggcctgagactaggaggatcttaaatgaccgacgtccgattccgcattatcggtacgggtgcctacgtaccggaacggatcgtctccaacgatgaagtcggcgcgccggccggggtggacgacgactggatcacccgcaagaccggtatccggcagcgtcgctgggccgccgacgaccaggccacctcggacctggccacggccgcggggcgggcagcgctgaaagcggcgggcatcacgcccgagcagctgaccgtgatcgcggtcgccacctccacgccggaccggccgcagccgcccacggcggcctatgtccagcaccacctcggtgcgaccggcactgcggcgttcgacgtcaacgcggtctgctccggcaccgtgttcgcgctgtcctcggtggcgggcaccctcgtgtaccggggcggttacgcgctggtcatcggcgcggacctgtactcgcgcatcctcaacccggccgaccgcaagacggtcgtgctgttcggggacggcgccggcgcaatggtcctcgggccgacctcgaccggcacgggccccatcgtccggcgcgtcgccctgcacaccttcggcggcctcaccgacctgatccgtgtgcccgcgggcggcagccgccagccgctggacacggatggcctcgacgcgggactgcagtacttcgcgatggacgggcgtgaggtgcgccgcttcgtcacggagcacctgccgcagctgatcaagggcttcctgcacgaggccggggtcgacgccgccgacatcagccacttcgtgccgcatcaggccaacggtgtcatgctcgacgaggtcttcggcgagctgcatctgccgcgggcgaccatgcaccggacggtcgagacctacggcaacacgggagcggcctccatcccgatcaccatggacgcggccgtgcgcgccggttccttccggccgggcgagctggtcctgctggccgggttcggcggcggcatggccgcgagcttcgccctgatcgagtggtaggctcagctagcacccggaattgtgagcggataacaattccttggaattgtgagcggataacaattataattaagttgttaggaggttagaatgactcagcgcattgcgtatgtgaccggcggcatgggtggtatcggaaccgccatttgccagcggctggccaaggatggctttcgtgtggtggccggttgcggccccaactcgccgcgccgcgaaaagtggctggagcagcagaaggccctgggcttcgatttcattgcctcggaaggcaatgtggctgactgggactcgaccaagaccgcattcgacaaggtcaagtccgaggtcggcgaggttgatgtgctgatcaacaacgccggtatcacccgcgacgtggtgttccgcaagatgacccgcgccgactgggatgcggtgatcgacaccaacctgacctcgctgttcaacgtcaccaagcaggtgatcgacggcatggccgaccgtggctggggccgcatcgtcaacatctcgtcggtgaacgggcagaagggccagttcggccagaccaactactccaccgccaaggccggcctgcatggcttcaccatggcactggcgcaggaagtggcgaccaagggcgtgaccgtcaacacggtctctccgggctatatcgccaccgacatggtcaaggcgatccgccaggacgtgctcgacaagatcgtcgcgacgatcccggtcaagcgcctgggcctgccggaagagatcgcctcgatctgcgcctggttgtcgtcggaggagtccggtttctcgaccggcgccgacttctcgctcaacggcggcctgcatatgggctgaacaggaggcaataaatgagcgcacaatccctggaagtaggccagaaggcccgtctcagcaagcggttcggggcggcggaggtagccgccttcgccgcgctctcggaggacttcaaccccctgcacctggacccggccttcgccgccaccacggcgttcgagcggcccatagtccacggcatgctgctcgccagcctcttctccgggctgctgggccagcagttgccgggcaaggggagcatctatctgggtcaaagcctcagcttcaagctgccggtctttgtcggggacgaggtgacggccgaggtggaggtgaccgcccttcgcgaggacaagcccatcgccaccctgaccacccgcatcttcacccaaggcggcgccctcgccgtgacgggggaagccgtggtcaagctgccttaagttgaggaggtagataatgtctacaacacataacgtccctcagggcgatcttgttttacgtactttagccatgcccgccgataccaatgccaatggtgacatctttggtggttggttaatgtcacaaatggatattggcggcgctattctggcaaaagaaattgcccacggtcgcgtagtgactgtgcgggttgaaggaatgactttcttacggccggttgcggtcggcgatgtggtgtgctgctatgcacgctgtgtccagaaagggacgacatcggtcagcattaatattgaagtgtgggtgaaaaaagtagcgtctgaaccaatcgggcaacggtataaagcgacagaagcattatttaagtatgtcgcggttgatcctgaaggaaaacctcgcgccttacctgttgagtaaaaaggagtgtatataaatgaaggtaactaatgttgaagaactgatgaaaaaaatgcaggaagtgcaaaatgctcaaaaaaaatttgggagttttactcaggaacaagtagatgaaattttcaggcaagcagcactagcagctaacagtgccagaatagatctagctaaaatggcagtggaagaaactaaaatgggaattgtagaggataaggttataaaaaatcattttgttgcagaatacatatataataagtataaaaatgaaaaaacttgtgggattttggaagaagatgaaggctttggaatggttaaaattgcagaacctgtaggtgtgattgcagcagtaattccaacaacaaatccaacatctacagcaatatttaaagcattattagctttgaaaacaagaaatggtataattttttcaccacatccaagagcaaaaaagtgtactattgcagcagctaagttagttcttgatgctgcagttaaagcaggtgctcctaaaggaattataggttggatagatgaaccttctattgaactttcacagatagtaatgaaagaagctgatataatccttgcaacaggtggtccaggtatggttaaagcagcttattcttcaggtaaacctgctataggggttggtcctggtaacacacctgctttaattgatgaaagtgctgatattaaaatggcagtaaattcaatacttctttccaaaacttttgataatggtatgatttgtgcttcagagcagtcggtagtagttgtagattcaatatatgaagaagttaagaaagaatttgctcatagaggagcttatattttaagtaaggatgaaacaactaaagttggaaaaatactcttagttaatggtacattaaatgctggtatcgttggtcagagtgcttataaaatagcagaaatggcaggagttaaagttccagaagatgctaaagttcttataggagaagtaaaatcagtggagcattcagaagagccattttcacatgaaaagttatctccagttttagctatgtatagagctaaaaattttgatgaagctcttttaaaagctggaagattagttgaactcggtggaatgggtcatacatctgtattatatgtaaatgcaataactgaaaaagtaaaagtagaaaaatttagagaaactatgaagactggtagaacattaataaatatgccttcagcacaaggtgctataggagacatatataactttaaactagctccttcattaacattaggttgtggttcatggggaggaaactccgtatcagaaaatgttggacctaaacacttattaaatataaaaagtgttgctgagaggagagaaaatatgctttggtttagagttcctgaaaaggtttattttaaatatggtagtcttggagttgcattaaaagaattagatattttggataagaaaaaagtatttatagtaacagataaagttctttatcaattaggttatatagatagagttacaaagattcttgaagaattgaaaatttcatataaaatatttacagatgtagaaccagatccaaccctagctacagctaaaaaaggtgcagaagaattgttatcatttaatccagatactattatagcagttggtggtggttcagcaatggatgctgctaagattatgtgggtaatgtatgaacatccggaagtaagatttgaagatttagctatgagatttatggatataagaaagagagtatatacttttcctaagatgggtgaaaaagcaatgatgatttctgttgcaacatcagcaggaacaggatcagaagtaacaccttttgcagtaattactgatgaaaaaacaggagctaaatatccattagctgattatgaattaactccaaatatggctataattgatgctgaacttatgatgggtatgccaaaaggattaacagcagcttcaggaatagatgcactaactcatgcaatagaagcttatgtatcaataatggcttcagaatatactaatggattagcgttagaagcaataagattgatatttaagtatttaccaatagcttacagtgaaggaacaacaagtataaaggcaagagaaaaaatggcgcatgcttcaacaatagctggtatggcatttgctaatgcatttttaggagtatgtcattcaatggcacataaattaggatcaactcatcacgtaccacatggcattgccaatgcactacttataaatgaagttataaaatttaatgcagtagaaaatccaagaaaacaagctgcatttccacaatataagtatccaaatataaaaaagagatatgctagaatagcagattaccttaacttaggtgggtcaacagacgatgaaaaagtacaattattaataaatgctatagatgaattaaaagctaagataaatattccagaaagtattaaagaagcaggagtaacagaagaaaaattttatgctactttagataaaatgtcagaattagcttttgatgatcaatgtacaggtgcaaaccctagatatccattaataagtgaaataaaacaaatgtatgtaaatgcatttatgactaggaggatcgataatgagcgcacccaccatcgaatccgagcagtcgacagacatcggctacgtgttcgaggttccggatcggccgaacggcccggccgttcgccgactactgcggcgcagcggcgcactgctgggagccgtcgggacggtggccacgctgaccgcgtggcgcagcaaacggccacgggttcgggcgatagcgctcggactgctggccccgggcggcggtcagctctatacccgcagcccgttgcgattcgtggccacggtcgccggcttcttcgcatcgctggtcgcgtggttcggcagcggcaacatcatcgccccggtcctggtgtggctgacggcggcgaccaacgccggcagtcacgccgccggcggccggaggacctggaacggtgcacgccgggtgattccgacggcggtggcgggggccgccgccgccggaatagtggcccgacgccgggcctttcacgccgcgcaggcccgtgggagaactcgtgccgagtatctgacgacagcgcctcgtctggacccgcagccgaaagatgcggcatccgaggaactgtcgcccaccgatctcgcggtcctgcgctcgctgctggaccgggcgctgcagcccctggagaatttcgacgggttcgaccgtatcgaccagttccagacttcggcgatgcgctaccagtgcaacttcatgcagtacgcgctggccacagcacaactgcacgccacgccgtcgttccacggttatctgtcggccgcacaacgcaatctgatcgacaagctcacgctgccggcggtgtggcgctactgggccttcgaacagacctggggcaatctcagtctggactgggacccgatgaaacgcgacaacatcatgctctcgggatacctaggcatgatgctgggtgcctacgaatccaacaccggcgacgaccgttaccgccgcagtggggcgttgcccttccggttggggaaacgcgactggccctacacccacgacatggtgagtgctgccgtgcacgacaacatgcagcgctccggtatgacgctgttcccctgcgaaccgaactggatctacagcgcctgcaacatgccggcgatcagctcgctgatgatgtccgaccgcctgcacggcacccggtacatcgaatcggtcggcgaggactttcgacgccggctgcacggcgaattcattactcccgatggccgtatcaccgcaatacggtcctcgcggctgggcgtgaccatcccgatgctcacctccacaatggccgactgcggcctggcgtccatgctgcacgcattcgatccggaactggcacagcggtgctggaccatcgcccgtcgtgagttcattgacacgactgggcccgaaccggtcatcgtgctgcgggggtgggacgcgatcgataccggcaactaccgtaagacgacgttgggcgccgtcgcacccgtcatgtgggcggccgccgagatgggcgacacagatctggtcgcccagctgaccaccacgttggagcggcatgcacagcccaccgagaccggcggagcccgctggtacgccgagctgtcgaccaatatgaacgcgatggcggccctggcgcgattcaacccgcccggtggccagcgggcgctgatcagtgccggacccggcacgcagatcctgaccggaccggtgctcgacgacgtcgtgtacccagaggtcctggtggcgtcggcacgcaccgatggagccgacctgcggctggtactgcggcccggggctggtgccgcacgcgtgagcatcggagtgcgacacctgcatcccggcggccgctaccgggtgaacggcgccgtcgacagcgaggtgaccgccgacaaccagggccgcagtcacctggaggtcgacctgatcgaccgcaccgaagtctccctgacaccggcgccatgagctatcataaaaataagaagcctgcatttgcaggcttcttatttttat

SEQ ID NO: 32 - DNA, 15272 bp, artificial sequence
  plasmid SG455
aaggccagcaaaaggccaggaaccgtaaaaaggccgcgttgctggcgtttttccataggctccgcccccctgacgagcatcacaaaaatcgacgctcaagtcagaggtggcgaaacccgacaggactataaagataccaggcgtttccccctggaagctccctcgtgcgctctcctgttccgaccctgccgcttaccggatacctgtccgcctttctcccttcgggaagcgtggcgctttctcatagctcacgctgtaggtatctcagttcggtgtaggtcgttcgctccaagctgggctgtgtgcacgaaccccccgttcagcccgaccgctgcgccttatccggtaactatcgtcttgagtccaacccggtaagacacgacttatcgccactggcagcagccactggtaacaggattagcagagcgaggtatgtaggcggtgctacagagttcttgaagtggtggcctaactacggctacactagaagaacagtatttggtatctgcgctctgctgaagccagttaccttcggaaaaagagttggtagctcttgatccggcaaacaaaccaccgctggtagcggtggtttttttgtttgcaagcagcagattacgcgcagaaaaaaaggatctcaagaagatcctttgatcttttctacggggtctgacgctcagtggaacgaaaactcacgttaagggattttggtcatgagattatcaaaaaggatcttcacctagatccttttaaattaaaaatgaagttttaaatcaatctaaagtatatatgagtaaacttggtctgacagctcttcctttttcaatattattgaagcatttatcagggttattgtctcatgagcggatacatatttgaatgtatttagaaaaataaacaaataggggttccgcgcacatttccccgaaaagtgccacctgacggtcctgcatcagctcttatatattaagctaccaacttagtatataagccaaaacttaaatgtgctaccaacacatcaagccgttagagaactctatctatagcaatatttcaaatgtaccgacatacaagagaaacattaactatatatattcaatttatgagattatcttaacagatataaatgtaaattgcaataagtaagatttagaagtttatagcctttgtgtattggaagcagtacgcaaaggcttttttatttgataaaaattagaagtatatttattttttcataattaatttatgaaaatgaaagggggtgagcaaagtgacagaggaaagcagtatcttatcaaataacaaggtattagcaatatcattattgactttagcagtaaacattatgacttttatagtgcttgtagctaagtagtacgaaagggggagctttaaaaagctccttggaatacatagaattcataaattaatttatgaaaagaagggcgtatatgaaaacttgtaaaaattgcaaagagtttattaaagatactgaaatatgcaaaatacattcgttgatgattcatgataaaacagtagcaacctattgcagtaaatacaatgagtcaagatgtttacataaagggaaagtccaatgtattaattgttcaaagatgaaccgatatggatggtgtgccataaaaatgagatgttttacagaggaagaacagaaaaaagaacgtacatgcattaaatattatgcaaggagctttaaaaaagctcatgtaaagaagagtaaaaagaaaaaataatttatttattaatttaatattgagagtgccgacacagtatgcactaaaaaatatatctgtggtgtagtgagccgatacaaaaggatagtcactcgcattttcataatacatcttatgttatgattatgtgtcggtgggacttcacgacgaaaacccacaataaaaaaagagttcggggtagggttaagcatagttgaggcaactaaacaatcaagctaggatatgcagtagcagaccgtaaggtcgttgtttaggtgtgttgtaatacatacgctattaagatgtaaaaatacggataccaatgaagggaaaagtataatttttggatgtagtttgtttgttcatctatgggcaaactacgtccaaagccgtttccaaatctgctaaaaagtatatcctttctaaaatcaaagtcaagtatgaaatcataaataaagtttaattttgaagttattatgatattatgtttttctattaaaataaattaagtatatagaatagtttaataatagtatatacttaatgtgataagtgtctgacagtgtcacagaaaggatgattgttatggattataagcggccggccagtgggcaagttgaaaaattcacaaaaatgtggtataatatctttgttcattagagcgataaacttgaatttgagagggaacttagatggtatttgaaaaaattgataaaaatagttggaacagaaaagagtattttgaccactactttgcaagtgtaccttgtacctacagcatgaccgttaaagtggatatcacacaaataaaggaaaagggaatgaaactatatcctgcaatgctttattatattgcaatgattgtaaaccgccattcagagtttaggacggcaatcaatcaagatggtgaattggggatatatgatgagatgataccaagctatacaatatttcacaatgatactgaaacattttccagcctttggactgagtgtaagtctgactttaaatcatttttagcagattatgaaagtgatacgcaacggtatggaaacaatcatagaatggaaggaaagccaaatgctccggaaaacatttttaatgtatctatgataccgtggtcaaccttcgatggctttaatctgaatttgcagaaaggatatgattatttgattcctatttttactatggggaaatattataaagaagataacaaaattatacttcctttggcaattcaagttcatcacgcagtatgtgacggatttcacatttgccgttttgtaaacgaattgcaggaattgataaatagttaacttcaggtttgtctgtaactaaaaacaagtatttaagcaaaaacatcgtagaaatacggtgttttttgttaccctaagtttgttaagggatgcataaactgcatcccttaacttgtttttcgtgtacctattttttgtgaatcgattatgtcttttgcgcattcgtcgacaattgcatatattgataaaaataataatagtgggtataattaagttgttaggaggttagttagagtgaaaccagtaacgttatacgatgtcgcagagtatgccggtgtctcttatcagaccgtttcccgcgtggtgaaccaggccagccacgtttctgcgaaaacgcgggaaaaagtggaagcggcgatggcggagctgaattacattcccaaccgcgtggcacaacaactggcgggcaaacagtcgttgctgattggcgttgccacctccagtctggccctgcacgcgccgtcgcaaattgtcgcggcgattaaatctcgcgccgatcaactgggtgccagcgtggtggtgtcgatggtagaacgaagcggcgtcgaagcctgtaaagcggcggtgcacaatcttctcgcgcaacgcgtcagtgggctgatcattaactatccgctggatgaccaggatgccattgctgtggaagctgcctgcactaatgttccggcgttatttcttgatgtctctgaccagacacccatcaacagtattattttctcccatgaagacggtacgcgactgggcgtggagcatctggtcgcattgggtcaccagcaaatcgcgctgttagcgggcccattaagttctgtctcggcgcgtctgcgtctggctggctggcataaatatctcactcgcaatcaaattcagccgatagcggaacgggaaggcgactggagtgccatgtccggttttcaacaaaccatgcaaatgctgaatgagggcatcgttcccactgcgatgctggttgccaacgatcagatggcgctgggcgcaatgcgcgccattaccgagtccgggctgcgcgttggtgcggacatctcggtagtgggatacgacgataccgaagacagctcatgttatatcccgccgttaaccaccatcaaacaggattttcgcctgctggggcaaaccagcgtggaccgcttgctgcaactctctcagggccaggcggtgaagggcaatcagctgttgcccgtctcactggtgaaaagaaaaaccaccctggcgcccaatacgcaaaccgcctctccccgcgcgttggccgattcattaatgcagctggcacgacaggtttcccgactggaaagcgggcagtgagcgcaacgcaattaatgtaagttagctcactcattaggcaccgggatctcgaccgatgcccttgagagccttcaacccagtcagctccttccggtgggcgcggggcatgactagcatgatcgtgctcctgtcgttgaggacccggctaggctggcggggttgccttactggttagcagaatgaatcaccgatacgcggctcagctagcacccggaattgtgagcggataacaattccttggaattgtgagcggataacaattataattaagttgttaggaggttagaatgaaaaattgtgtcatcgtcagtgcggtacgtactgctatcggtagttttaacggttcactcgcttccaccagcgccatcgacctgggggcgacagtaattaaagccgccattgaacgtgcaaaaatcgattcacaacacgttgatgaagtgattatgggtaacgtgttacaagccgggctggggcaaaatccggcgcgtcaggcactgttaaaaagcgggctggcagaaacggtgtgcggattcacggtcaataaagtatgtggttcgggtcttaaaagtgtggcgcttgccgcccaggccattcaggcaggtcaggcgcagagcattgtggcggggggtatggaaaatatgagtttagccccctacttactcgatgcaaaagcacgctctggttatcgtcttggagacggacaggtttatgacgtaatcctgcgcgatggcctgatgtgcgccacccatggttatcatatggggattaccgccgaaaacgtggctaaagagtacggaattacccgtgaaatgcaggatgaactggcgctacattcacagcgtaaagcggcagccgcaattgagtccggtgcttttacagccgaaatcgtcccggtaaatgttgtcactcgaaagaaaaccttcgtcttcagtcaagacgaattcccgaaagcgaattcaacggctgaagcgttaggtgcattgcgcccggccttcgataaagcaggaacagtcaccgctgggaacgcgtctggtattaacgacggtgctgccgctctggtgattatggaagaatctgcggcgctggcagcaggccttacccccctggctcgcattaaaagttatgccagcggtggcgtgccccccgcattgatgggtatggggccagtacctgccacgcaaaaagcgttacaactggcggggctgcaactggcggatattgatctcattgaggctaatgaagcatttgctgcacagttccttgccgttgggaaaaacctgggctttgattctgagaaagtgaatgtcaacggcggggccatcgcgctcgggcatcctatcggtgccagtggtgctcgtattctggtcacactattacatgccatgcaggcacgcgataaaacgctggggctggcaacactgtgcattggcggcggtcagggaattgcgatggtgattgaacggttgaattaatagggaggtctgtttaatgaaaaaggtatgtgttataggtgcaggtactatgggttcaggaattgctcaggcatttgcagctaaaggatttgaagtagtattaagagatattaaagatgaatttgttgatagaggattagattttatcaataaaaatctttctaaattagttaaaaaaggaaagatagaagaagctactaaagttgaaatcttaactagaatttccggaacagttgaccttaatatggcagctgattgcgatttagttatagaagcagctgttgaaagaatggatattaaaaagcagatttttgctgacttagacaatatatgcaagccagaaacaattcttgcatcaaatacatcatcactttcaataacagaagtggcatcagcaactaaaagacctgataaggttataggtatgcatttctttaatccagctcctgttatgaagcttgtagaggtaataagaggaatagctacatcacaagaaacttttgatgcagttaaagagacatctatagcaataggaaaagatcctgtagaagtagcagaagcaccaggatttgttgtaaatagaatattaataccaatgattaatgaagcagttggtatattagcagaaggaatagcttcagtagaagacatagataaagctatgaaacttggagctaatcacccaatgggaccattagaattaggtgattttataggtcttgatatatgtcttgctataatggatgttttatactcagaaactggagattctaagtatagaccacatacattacttaagaagtatgtaagagcaggatggcttggaagaaaatcaggaaaaggtttctacgattattcaaaataagtttacaagaatccctttaggaggattagtcatggaactaaacaatgtcatccttgaaaaggaaggtaaagttgctgtagttaccattaacagacctaaagcattaaatgcgttaaatagtgatacactaaaagaaatggattatgttataggtgaaattgaaaatgatagcgaagtacttgcagtaattttaactggagcaggagaaaaatcatttgtagcaggagcagatatttctgagatgaaggaaatgaataccattgaaggtagaaaattcgggatacttggaaataaagtgtttagaagattagaacttcttgaaaagcctgtaatagcagctgttaatggttttgctttaggaggcggatgcgaaatagctatgtcttgtgatataagaatagcttcaagcaacgcaagatttggtcaaccagaagtaggtctcggaataacacctggttttggtggtacacaaagactttcaagattagttggaatgggcatggcaaagcagcttatatttactgcacaaaatataaaggcagatgaagcattaagaatcggacttgtaaataaggtagtagaacctagtgaattaatgaatacagcaaaagaaattgcaaacaaaattgtgagcaatgctccagtagctgttaagttaagcaaacaggctattaatagaggaatgcagtgtgatattgatactgctttagcatttgaatcagaagcatttggagaatgcttttcaacagaggatcaaaaggatgcaatgacagctttcatagagaaaagaaaaattgaaggcttcaaaaatagataggaggtaagtttataggaggaattccatatgatatggaaacggaaaatcaccctggaagcactgaatgctatgggtgaaggaaacatggtggggttcctggatattcgctttgaacatattggtgatgacacccttgaagcgacaatgccagtagactcgcggacaaagcagcctttcgggttgctgcatggaggagcatccgtggtactggccgaaagtatcggttccgttgccggttatttatgtaccgaaggtgagcaaaaagtggttggtctggaaatcaatgctaaccacgtccgctcggcacgagaagggcgggtgcgcggcgtatgcaaaccgttgcatctcggttcgcgtcaccaggtctggcagattgaaatcttcgatgagaaagggcgtttgtgctgttcgtcacgattgacgaccgccattttgtgaatttacacgatcgacgtgctcagctagcacccggaattgtgagcggataacaattccttggaattgtgagcggataacaattataattaagttgttaggaggttagaatgagtctgaatttccttgattttgaacagccgattgcagagctggaagcgaaaatcgattctctgactgcggttagccgtcaggatgagaaactggatattaacatcgatgaagaagtgcatcgtctgcgtgaaaaaagcgtagaactgacacgtaaaatcttcgccgatctcggtgcatggcagattgcgcaactggcacgccatccacagcgtccttataccctggattacgttcgcctggcatttgatgaatttgacgaactggctggcgaccgcgcgtatgcagacgataaagctatcgtcggtggtatcgcccgtctcgatggtcgtccggtgatgatcattggtcatcaaaaaggtcgtgaaaccaaagaaaaaattcgccgtaactttggtatgccagcgccagaaggttaccgcaaagcactgcgtctgatgcaaatggctgaacgctttaagatgccaatcatcacctttatcgacaccccgggggcttatccgggcgtgggcgcagaagagcgcggtcagtctgaagccattgcacgcaacctgcgtgaaatgtctcgccttagcgtaccgactatttgtaccgttatcggtgaaggtggttctggcggcgcgctggcgattggcgtgggcgataaagtgaatatgctgcaatacagcacctattccgttatctcgccggaaggttgtgcgtccattctgtggaagagcgctgataaagcgccgctggcggctgaagcgatgggtatcatcgctccgcgtctgaaagaactaaaactgatcgactccatcatcccagaaccgctgggtggtgctcaccgtaacccggaagcgatggcggcatcgttgaaagcgcaactgttggcggatctggccgatctcgacgtgttaagcactgaagatttaaaaaatcgtcgttatcagcgcctgatgagctacggttacgcgtaataaggaggaacccactcatggatattcgtaagattaaaaaactgatcgagctggttgaagaatcaggcatctccgaactggaaatttctgaaggcgaagagtcagtacgcattagccgtgcagctcctgccgcaagtttccctgtgatgcaacaagcttacgctgcaccaatgatgcagcagccagctcaatctaacgcagccgctccggcgaccgttccttccatggaagcgccagcagcagcggaaatcagtggtcacatcgtacgttccccgatggttggtactttctaccgcaccccaagcccggacgcaaaagcgttcatcgaagtgggtcagaaagtcaacgtgggcgataccctgtgcatcgttgaagccatgaaaatgatgaaccagatcgaagcggacaaatccggtaccgtgaaagcaattctggtcgaaagtggacaaccggtagaatttgacgagccgctggtcgtcatcgagtaacgaggcgaacatgctggataaaattgttattgccaaccgcggcgagattgcattgcgtattcttcgtgcctgtaaagaactgggcatcaagactgtcgctgtgcactccagcgcggatcgcgatctaaaacacgtattactggcagatgaaacggtctgtattggccctgctccgtcagtaaaaagttatctgaacatcccggcaatcatcagcgccgctgaaatcaccggcgcagtagcaatccatccgggttacggcttcctctccgagaacgccaactttgccgagcaggttgaacgctccggctttatcttcattggcccgaaagcagaaaccattcgcctgatgggcgacaaagtatccgcaatcgcggcgatgaaaaaagcgggcgtcccttgcgtaccgggttctgacggcccgctgggcgacgatatggataaaaaccgtgccattgctaaacgcattggttatccggtgattatcaaagcctccggcggcggcggcggtcgcggtatgcgcgtagtgcgcggcgacgctgaactggcacaatccatctccatgacccgtgcggaagcgaaagctgctttcagcaacgatatggtttacatggagaaatacctggaaaatcctcgccacgtcgagattcaggtactggctgacggtcagggcaacgctatctatctggcggaacgtgactgctccatgcaacgccgccaccagaaagtggtcgaagaagcgccagcaccgggcattaccccggaactgcgtcgctacatcggcgaacgttgcgctaaagcgtgtgttgatatcggctatcgcggtgcaggtactttcgagttcctgttcgaaaacggcgagttctatttcatcgaaatgaacacccgtattcaggtagaacacccggttacagaaatgatcaccggcgttgacctgatcaaagaacagctgcgtatcgctgccggtcaaccgctgtcgatcaagcaagaagaagttcacgttcgcggccatgcggtggaatgtcgtatcaacgccgaagatccgaacaccttcctgccaagtccgggcaaaatcacccgtttccacgcacctggcggttttggcgtacgttgggagtctcatatctacgcgggctacaccgtaccgccgtactatgactcaatgatcggtaagctgatttgctacggtgaaaaccgtgacgtggcgattgcccgcatgaagaatgcgctgcaggagctgatcatcgacggtatcaaaaccaacgttgatctgcagatccgcatcatgaatgacgagaacttccagcatggtggcactaacatccactatctggagaaaaaactcggtcttcaggaaaaataatataggaggatataacatgagctggattgaacgaattaaaagcaacattactcccacccgcaaggcgagcattcctgaaggggtgtggactaagtgtgatagctgcggtcaggttttataccgcgctgagctggaacgtaatcttgaggtctgtccgaagtgtgaccatcacatgcgtatgacagcgcgtaatcgcctgcatagcctgttagatgaaggaagccttgtggagctgggtagcgagcttgagccgaaagatgtgctgaagtttcgtgactccaagaagtataaagaccgtctggcatctgcgcagaaagaaaccggcgaaaaagatgcgctggtggtgatgaaaggcactctgtatggaatgccggttgtcgctgcggcattcgagttcgcctttatgggcggttcaatggggtctgttgtgggtgcacgtttcgtgcgtgccgttgagcaggcgctggaagataactgcccgctgatctgcttctccgcctctggtggcgcacgtatgcaggaagcactgatgtcgctgatgcagatggcgaaaacctctgcggcactggcaaaaatgcaggagcgcggcttgccgtacatctccgtgctgaccgacccgacgatgggcggtgtttctgcaagtttcgccatgctgggcgatctcaacatcgctgaaccgaaagcgttaatcggctttgccggtccgcgtgttatcgaacagaccgttcgcgaaaaactgccgcctggattccagcgcagtgaattcctgatcgagaaaggcgcgatcgacatgatcgtccgtcgtccggaaatgcgcctgaaactggcgagtattctggcgaagttgatgaatctgccagcgccgaatcctgaagcgccgcgtgaaggcgtagtggtacccccggtaccggatcaggaacctgaggcctgagactaggaggatcttaaatgaccgacgtccgattccgcattatcggtacgggtgcctacgtaccggaacggatcgtctccaacgatgaagtcggcgcgccggccggggtggacgacgactggatcacccgcaagaccggtatccggcagcgtcgctgggccgccgacgaccaggccacctcggacctggccacggccgcggggcgggcagcgctgaaagcggcgggcatcacgcccgagcagctgaccgtgatcgcggtcgccacctccacgccggaccggccgcagccgcccacggcggcctatgtccagcaccacctcggtgcgaccggcactgcggcgttcgacgtcaacgcggtctgctccggcaccgtgttcgcgctgtcctcggtggcgggcaccctcgtgtaccggggcggttacgcgctggtcatcggcgcggacctgtactcgcgcatcctcaacccggccgaccgcaagacggtcgtgctgttcggggacggcgccggcgcaatggtcctcgggccgacctcgaccggcacgggccccatcgtccggcgcgtcgccctgcacaccttcggcggcctcaccgacctgatccgtgtgcccgcgggcggcagccgccagccgctggacacggatggcctcgacgcgggactgcagtacttcgcgatggacgggcgtgaggtgcgccgcttcgtcacggagcacctgccgcagctgatcaagggcttcctgcacgaggccggggtcgacgccgccgacatcagccacttcgtgccgcatcaggccaacggtgtcatgctcgacgaggtcttcggcgagctgcatctgccgcgggcgaccatgcaccggacggtcgagacctacggcaacacgggagcggcctccatcccgatcaccatggacgcggccgtgcgcgccggttccttccggccgggcgagctggtcctgctggccgggttcggcggcggcatggccgcgagcttcgccctgatcgagtggtaggctcagctagcacccggaattgtgagcggataacaattccttggaattgtgagcggataacaattataattaagttgttaggaggttagaatgactcagcgcattgcgtatgtgaccggcggcatgggtggtatcggaaccgccatttgccagcggctggccaaggatggctttcgtgtggtggccggttgcggccccaactcgccgcgccgcgaaaagtggctggagcagcagaaggccctgggcttcgatttcattgcctcggaaggcaatgtggctgactgggactcgaccaagaccgcattcgacaaggtcaagtccgaggtcggcgaggttgatgtgctgatcaacaacgccggtatcacccgcgacgtggtgttccgcaagatgacccgcgccgactgggatgcggtgatcgacaccaacctgacctcgctgttcaacgtcaccaagcaggtgatcgacggcatggccgaccgtggctggggccgcatcgtcaacatctcgtcggtgaacgggcagaagggccagttcggccagaccaactactccaccgccaaggccggcctgcatggcttcaccatggcactggcgcaggaagtggcgaccaagggcgtgaccgtcaacacggtctctccgggctatatcgccaccgacatggtcaaggcgatccgccaggacgtgctcgacaagatcgtcgcgacgatcccggtcaagcgcctgggcctgccggaagagatcgcctcgatctgcgcctggttgtcgtcggaggagtccggtttctcgaccggcgccgacttctcgctcaacggcggcctgcatatgggctgaacaggaggcaataaatgagcgcacaatccctggaagtaggccagaaggcccgtctcagcaagcggttcggggcggcggaggtagccgccttcgccgcgctctcggaggacttcaaccccctgcacctggacccggccttcgccgccaccacggcgttcgagcggcccatagtccacggcatgctgctcgccagcctcttctccgggctgctgggccagcagttgccgggcaaggggagcatctatctgggtcaaagcctcagcttcaagctgccggtctttgtcggggacgaggtgacggccgaggtggaggtgaccgcccttcgcgaggacaagcccatcgccaccctgaccacccgcatcttcacccaaggcggcgccctcgccgtgacgggggaagccgtggtcaagctgccttaagttgaggaggtagataatgtctacaacacataacgtccctcagggcgatcttgttttacgtactttagccatgcccgccgataccaatgccaatggtgacatctttggtggttggttaatgtcacaaatggatattggcggcgctattctggcaaaagaaattgcccacggtcgcgtagtgactgtgcgggttgaaggaatgactttcttacggccggttgcggtcggcgatgtggtgtgctgctatgcacgctgtgtccagaaagggacgacatcggtcagcattaatattgaagtgtgggtgaaaaaagtagcgtctgaaccaatcgggcaacggtataaagcgacagaagcattatttaagtatgtcgcggttgatcctgaaggaaaacctcgcgccttacctgttgagtaaagcgactgacgtaggaggatatcaatgctcctatttccaagaagaactaatatagcctttttcaaaacaacaggcatttttgctaattttcctttgctaggtagaaccattacaacttcaccatctttccttacacataaactgtcaaaggaagtaaccagggcatcaacttcgcctccaagaccaaagagaattgttgtcgcaattactggtgcgactggtgttgcactgggaatcagacttctacaagtgctaaaagagttgagcgtagaaacccatttggtgatttcaaaatggggtgcagcaacaatgaaatatgaaacagattgggaaccgcatgacgtggcggccttggcaaccaagacatactctgttcgtgatgtttctgcatgcatttcgtccggatctttccagcatgatggtatgattgttgtgccctgttccatgaaatcactagctgctattagaatcggttttacagaggatttaattacaagagctgccgatgtttcgattaaagagaatcgtaagttactactggttactcgggaaacccctttatcttccatccatcttgaaaacatgttgtctttatgcagggcaggtgttataatttttcctccggtacctgcgttttatacaagacccaagagccttcatgacctattagaacaaagtgttggcaggatcctagactgctttggcatccacgctgacacttttcctcgttgggaaggaataaaaagcaagtaatactatcataaaaataagaagcctgcatttgcaggcttcttatttttat

SEQ ID NO: 33 - DNA, 20891 bp, artificial sequence
  plasmid SG479
aaggccagcaaaaggccaggaaccgtaaaaaggccgcgttgctggcgtttttccataggctccgcccccctgacgagcatcacaaaaatcgacgctcaagtcagaggtggcgaaacccgacaggactataaagataccaggcgtttccccctggaagctccctcgtgcgctctcctgttccgaccctgccgcttaccggatacctgtccgcctttctcccttcgggaagcgtggcgctttctcatagctcacgctgtaggtatctcagttcggtgtaggtcgttcgctccaagctgggctgtgtgcacgaaccccccgttcagcccgaccgctgcgccttatccggtaactatcgtcttgagtccaacccggtaagacacgacttatcgccactggcagcagccactggtaacaggattagcagagcgaggtatgtaggcggtgctacagagttcttgaagtggtggcctaactacggctacactagaagaacagtatttggtatctgcgctctgctgaagccagttaccttcggaaaaagagttggtagctcttgatccggcaaacaaaccaccgctggtagcggtggtttttttgtttgcaagcagcagattacgcgcagaaaaaaaggatctcaagaagatcctttgatcttttctacggggtctgacgctcagtggaacgaaaactcacgttaagggattttggtcatgagattatcaaaaaggatcttcacctagatccttttaaattaaaaatgaagttttaaatcaatctaaagtatatatgagtaaacttggtctgacagctcttcctttttcaatattattgaagcatttatcagggttattgtctcatgagcggatacatatttgaatgtatttagaaaaataaacaaataggggttccgcgcacatttccccgaaaagtgccacctgacggtcctgcatcagctcttatatattaagctaccaacttagtatataagccaaaacttaaatgtgctaccaacacatcaagccgttagagaactctatctatagcaatatttcaaatgtaccgacatacaagagaaacattaactatatatattcaatttatgagattatcttaacagatataaatgtaaattgcaataagtaagatttagaagtttatagcctttgtgtattggaagcagtacgcaaaggcttttttatttgataaaaattagaagtatatttattttttcataattaatttatgaaaatgaaagggggtgagcaaagtgacagaggaaagcagtatcttatcaaataacaaggtattagcaatatcattattgactttagcagtaaacattatgacttttatagtgcttgtagctaagtagtacgaaagggggagctttaaaaagctccttggaatacatagaattcataaattaatttatgaaaagaagggcgtatatgaaaacttgtaaaaattgcaaagagtttattaaagatactgaaatatgcaaaatacattcgttgatgattcatgataaaacagtagcaacctattgcagtaaatacaatgagtcaagatgtttacataaagggaaagtccaatgtattaattgttcaaagatgaaccgatatggatggtgtgccataaaaatgagatgttttacagaggaagaacagaaaaaagaacgtacatgcattaaatattatgcaaggagctttaaaaaagctcatgtaaagaagagtaaaaagaaaaaataatttatttattaatttaatattgagagtgccgacacagtatgcactaaaaaatatatctgtggtgtagtgagccgatacaaaaggatagtcactcgcattttcataatacatcttatgttatgattatgtgtcggtgggacttcacgacgaaaacccacaataaaaaaagagttcggggtagggttaagcatagttgaggcaactaaacaatcaagctaggatatgcagtagcagaccgtaaggtcgttgtttaggtgtgttgtaatacatacgctattaagatgtaaaaatacggataccaatgaagggaaaagtataatttttggatgtagtttgtttgttcatctatgggcaaactacgtccaaagccgtttccaaatctgctaaaaagtatatcctttctaaaatcaaagtcaagtatgaaatcataaataaagtttaattttgaagttattatgatattatgtttttctattaaaataaattaagtatatagaatagtttaataatagtatatacttaatgtgataagtgtctgacagtgtcacagaaaggatgattgttatggattataagcggccggccagtgggcaagttgaaaaattcacaaaaatgtggtataatatctttgttcattagagcgataaacttgaatttgagagggaacttagatggtatttgaaaaaattgataaaaatagttggaacagaaaagagtattttgaccactactttgcaagtgtaccttgtacctacagcatgaccgttaaagtggatatcacacaaataaaggaaaagggaatgaaactatatcctgcaatgctttattatattgcaatgattgtaaaccgccattcagagtttaggacggcaatcaatcaagatggtgaattggggatatatgatgagatgataccaagctatacaatatttcacaatgatactgaaacattttccagcctttggactgagtgtaagtctgactttaaatcatttttagcagattatgaaagtgatacgcaacggtatggaaacaatcatagaatggaaggaaagccaaatgctccggaaaacatttttaatgtatctatgataccgtggtcaaccttcgatggctttaatctgaatttgcagaaaggatatgattatttgattcctatttttactatggggaaatattataaagaagataacaaaattatacttcctttggcaattcaagttcatcacgcagtatgtgacggatttcacatttgccgttttgtaaacgaattgcaggaattgataaatagttaacttcaggtttgtctgtaactaaaaacaagtatttaagcaaaaacatcgtagaaatacggtgttttttgttaccctaagtttgttaagggatgcataaactgcatcccttaacttgtttttcgtgtacctattttttgtgaatcgattatgtcttttgcgcattcgtcgacaattgcatatattgataaaaataataatagtgggtataattaagttgttaggaggttagttagagtgaaaccagtaacgttatacgatgtcgcagagtatgccggtgtctcttatcagaccgtttcccgcgtggtgaaccaggccagccacgtttctgcgaaaacgcgggaaaaagtggaagcggcgatggcggagctgaattacattcccaaccgcgtggcacaacaactggcgggcaaacagtcgttgctgattggcgttgccacctccagtctggccctgcacgcgccgtcgcaaattgtcgcggcgattaaatctcgcgccgatcaactgggtgccagcgtggtggtgtcgatggtagaacgaagcggcgtcgaagcctgtaaagcggcggtgcacaatcttctcgcgcaacgcgtcagtgggctgatcattaactatccgctggatgaccaggatgccattgctgtggaagctgcctgcactaatgttccggcgttatttcttgatgtctctgaccagacacccatcaacagtattattttctcccatgaagacggtacgcgactgggcgtggagcatctggtcgcattgggtcaccagcaaatcgcgctgttagcgggcccattaagttctgtctcggcgcgtctgcgtctggctggctggcataaatatctcactcgcaatcaaattcagccgatagcggaacgggaaggcgactggagtgccatgtccggttttcaacaaaccatgcaaatgctgaatgagggcatcgttcccactgcgatgctggttgccaacgatcagatggcgctgggcgcaatgcgcgccattaccgagtccgggctgcgcgttggtgcggacatctcggtagtgggatacgacgataccgaagacagctcatgttatatcccgccgttaaccaccatcaaacaggattttcgcctgctggggcaaaccagcgtggaccgcttgctgcaactctctcagggccaggcggtgaagggcaatcagctgttgcccgtctcactggtgaaaagaaaaaccaccctggcgcccaatacgcaaaccgcctctccccgcgcgttggccgattcattaatgcagctggcacgacaggtttcccgactggaaagcgggcagtgagcgcaacgcaattaatgtaagttagctcactcattaggcaccgggatctcgaccgatgcccttgagagccttcaacccagtcagctccttccggtgggcgcggggcatgactagcatgatcgtgctcctgtcgttgaggacccggctaggctggcggggttgccttactggttagcagaatgaatcaccgatacgcggctcagctagcacccggaattgtgagcggataacaattccttggaattgtgagcggataacaattataattaagttgttaggaggttagaatggaaaactttatcggaagccacatgatttatacgtatgaaaacggatgggaatacgagatttatattaaaaacgaccatacaattgattatagaattcatagcggaatggttgccggacgctgggttcgagatcaggaagtgaatattgtcaaactgacagaaggcgtatataaagtgtcttggacagagccgactggcacggatgtttcattaaactttatgccaaatgaaaaacgcatgcatggcattattttcttcccgaaatgggtgcatgaacatcctgaaattacggtttgctaccaaaatgaccacattgatttgatgaaagaatcccgcgaaaaatatgaaacgtatccaaaatacgttgtacctgaatttgcggaaattacatttctgaaaaatgaaggagtcgacaacgaagaagtgatttcgaaggctccttatgagggaatgacagacgatattcgcgcgggaagattataaagtacgataggaggatcactatgtatgattttgtgattattggcggtggcatcatcggcatgtcgaccgccatgcaactgattgatgtctacccggacgcccgcattgcgttgctggaaaaagagtccggcccggcctgtcaccagacgggccacaacagcggcgtgatccatgccggggtttattacacgcccggtagcctgaaggcacagttttgcctggcgggaaaccgcgccactaaagccttttgcgatcaaaacggcattcgctatgacaactgcggcaagatgctggtcgccacctctgaactcgaaatggaacggatgcgcgcgttgtgggaacgcacggcggcaaacggtatcgagcgcgagtggttaaacgccgatgaactgcgcgagcgcgaaccgaatatcaccgggcttggcggtatttttgtgccgtccagcggcattgtcagctaccgcgaagtaacggcggcgatggcaaaaattttccaggccagaggcggcgagattatctataacgccgaagtcagcggcctcagtgagcataaaaacggcgtggtgatacgtacccgccagggcggcgaatatgaagcatcgacgctgattagctgttccgggctgatggctgaccggctggtgaaaatgctcggactcgaaccgggctttatcatctgcccgttccgtggtgagtatttccgccttgcgccggagcataaccagattgttaaccacctgatttaccccattcccgaccccgcgatgccatttttgggcgtgcatctcacccgaatgatcgatggcagcgtgaccgtcgggccaaacgcggtgctggcttttaaacgcgaaggctaccacaagcgcgacttctcgtttagcgacacgctggaaattttgggctcgtcggggattcgccgggtgctgcaaaaccatctacgctcaggactgggcgagatgaaaaactcgctgtgcaaaagcggctatctgcggctggtgcaaaagtattgtccccggctttcgttaagcgatctccagccctggcccgccggtgtgcgggcgcaggcggtatcgccggacggcaagctgattgacgattttctgtttgtcaccaccccgcgcacgatccacacctgcaatgcgccctccccggcagcgacatcagcaattcctattggtgcgtatattgtcagcaaggtacaaacgctgttggcaagccagagtaaccccggacgcacgctgcgagcggcacgtagtgtggatgccttacacgccgcatttaatcaataaaagtcgactgaggaggatcatcatgacattacaagaggcagttgcaaagtttgttgaagatggcgacgctatctccttcggcggctttacaacaaacaagaaacctatggctgctgttcgcgagattctgcgccagggcaagaaagacttcatcgcatatgcaggtcctgccggatctgactgggatatgctgattggagaggatcgcgtaaaagcgtacatcaactgctatacagctgactccggtgttaccaacgtttcccgtcgtttccgcaaaaaaatcgaggccggcgagctgatctatgaggactactcccaggatgccatcatgtacatgcttcacgctgcttccttaggtcttccattcttaccggtacgttttatgatcggttccggactggttgatgagtggggaatcacaaaggaagtgcgccagactatcgacaagctgccgaacgacaaatttgtgtacatggacaacccatttaacccaggtgagaagaccgtatgccttccagttccgcagctggatacagcaatcatccacgtacagaaggcttcacctgacggaacctgcattctgctcggcgacgagttccacgatgtagatattgctgttgcagctaagaaggttatcgttacatgtgaggagctggtaagcaacgaagtgatccgcagagatccaacccttacaaagattccgtgcttcgcagttgacgctgtctgcgttgctccttacggcgcatacccgacacagtgctacggctactatgattatgacaacagcttcctgaaggcttatggcgcagccagcaagacagaggaggatttcaaggcattcttaaaagagtacgtttacgacgtgaaagacaatgaagagttccttgagaagatcggtgtaaatcgtctccttaagttaaaagtatctgatggctttggatatgcaacagatgtaagcaaggaggattaagtagctgaggaggatctagaatgggtcaaaaatcaaaggcaatgacacttgtaaagaatttattagataatcattataaagaagtaaatatggcaaaagaaagaggggaactagttggttggtcaacatcaatatttcctcaagagattgcagaaacatttggattacatgtattatatcctgaaaatcatgcggcagcagtagcagccaagcacgaatctttgaaagtatgcgaagttgctgaaagtaaaggatattcaatagatatatgttcttatgctagagtaaatttaggatatgtagacttaaagaaaatagaaagtataaacatgcctcaaccagacttcatactttgctgtaataacatatgtaataccgttataaaatggtatgaaaacatagcaaaggaattaaatattcctatgattttaatggataccccttttaacagtgaatacgaaattactcaagaaagaattgattatttcaaaggacagcttcaagaggctataagaaaattagaagaaattacaggtaaaaaatttgaccaaaagcgttttgaagaagttatgaaaatatccacagaagcgggaaatttgtggaaagaatctatgagtctaacaaaggctattccagcaccaatgaatggatttgaaatgtttaattatatggctgttatagtttgtgctcgtgggaaaaaggaaactgtagaaatttttaagactcttatagatgaattgcaagaaagaatagataagggagaaacaagttatagaggagaacaaaaacacagaatcatgtttgaaggtataccatgttggccatatctaagttataaattaagatcattaaatgataaaggaattaatatggtaggtagtgtttatacggatgcgtgggcacttcaatatgaatcaaatgatcttgatggaatggcaaaagcatattgtagcataatgaataatgttaatttagatagacaagtagacatgagagctaaagttattagagattttaagtgtgatggagcaatatatcatatgaatcgaagctgtaagctaatggattttatgcaatatgagttagaaagaagagtagaagcaaaaactaatgtgccatatattggatttgatggggaccaagcagatccaaggaacttcacaaaagctcagtttgaaacaagagtacaaggacttgcagaagttatggaagaaagaaaaaatgtaggaggtgtaaagcatgaatagagatgactgcaggaggatctacaatggctgataagaaagaggtcaaaaagaatgcagcaaaagtgattaatggtatattagctaaatcttatgcagatgcttggaaggcaaaagaagaaggaagaccggttggttggtcaacttccgtatttccacaggaattagtagaagtttttggtttagacgtattatatccagaaaaccaagctgcaggggttgcagctaagaaagaatctttatctctttgtgaagctgcagaaagtgctggatattcaattgatttatgtgcatatgcaagaacaaattttggacttttagaaaagggtggttcagaaaacttaaatatgccaaagcctgactttatatgctgctgtaataatatttgtaatcaagttattaaatggtatgaaaacattgcaaaggaattagatataccattaataatgattgatactacatttaataatgaaaatgaggtaacagaaaatagaattaaataccttagagctcaatttgaagaggctataaaacaacttgagaaaatttctggaaagaaatttgatcccaagaagtttgaagaagttatgaaaatctccgctgaaaacggtaagctttggaaatattctatgagtttaccatcaggatctttcccatcaccaatgaatggatttgacttatttacttatatggctgttatcgtatgctatagaggtaaaatagaaactacagaagcttttaaattattgatttctgaattagaagataatattagaaataaagcaacttcctttagaggagaagagaaatatagaattatgatggaaggaattccatgctggccatatataggctataagatgagaactttagcaggctatggtgttaatatgactggaagcgtttaccctcatgcttgggcattacagtatgaagtaaacgatttagatggaatggctaaagcttacagtactatgtttaataatgttaacttagaaagaatgtgtaaatacagagtagattctttaatagatggaaattgtgatggagcattctatcatatgaatagaagctgtaaattgatgagttttatacaatatgaaatggaaagacaagtttttcaaaaaacaggcataccatatgcgggcttcgatggagaccaagcagatccaagaaactttagtaaggctcagtttgaaacaagactgcaagggctagtagaagttatggaagaaagaaagaaaggaggaaacaaataaagctgagcaggaggatctacatgaaagcattatctattaaaccagaaatctatacctttgatacatgtaaagaatttataaacaaatttaaaataggaaaagaagatttaattattacaagtgagcatacttatgtttcatatttttctaaatataaccttgataccaatgtaatctttattagaaaatacggcactggagagccaagtgatacaatggtagaagcaatttgtaaggatataaaagatattacttataaaagagtaattgctattggcggcggaagtgtccttgacgtttcaaaattgtttgcattaaagaaagtctcgccagtacttgatttatttgatcacaaattagaatttgtaaaagataaggaattgatcctaattccaacaacttgcggaacaggcagtgaagtaactaatatttctattcttgaattgaagtcaagacatacaaaattaggtcttgctatagatgaactatatgcagattttgctgttatgattccagaacttctagagaatttaccctttaaattttttgcaactagttccattgatgccttgattcattccattgaatccagtgtttcaccaaaagctacaagctatacagaaatgttttcctataaagcaatggaaatgatcttaaaaggatatcaggagatttcaaaaaatggcccagacgccaggttttccttgttagataaatttttacttgcaagcaattatgctggaattgcatttggcaatgcagggtgtggtgcagtacatgctatgagttatcctttaggtgctaattaccatgttcctcatggagaagcaaattatcaaatgttcattggagtatttaaaacctattatcgtttaaaaccacaaggtaaaattacaaaactaaataaattcttagcatccattttaaactgcaaagaaaatgaagtttacattaaaatagaagagttattaaatgtattgattcctaaaaaacaattacgtgagtatggggtaaaagaaaaagaattaaaggaatttacacaaagtgttatgactaaacaaggtcgtttaatggcaaataactatacagaattaaatgaacaaactgtatatgaaatatataaatcattatattaagctcagctagcacccggaattgtgagcggataacaattccttggaattgtgagcggataacaattataattaagttgttaggaggttagaatgttgaaggaacaattacctaaaataataactgataaagtccctggaccgaaagcagaagaagtaatacgaagaagagaagatgcagtaccctctgcaattaaatgtgtatatcctgttgtaataaaaagggcagaaggtgcggtgattgaggatgttgatgaaaattattttcttgactggactggtggtgtaggcgtactaaacgttggattttcccatccagaagtggttgaagctgtgaaagaacagtcagagaagtatttccatggtatgtttaatattgttacacacgaaggatatgttaagctggcagagaaaatgaactccattgttcctgtaaagggaaataagaaaaaaacgtttttcgcaaatagtggagcagaggctgatgaaaatgcagtaaaaatagcaaaagcttttacaaatagacccaatatagttgtattttcaggggcatttcatggacgtacagttatgaccatggcaatgacatcgaaaaaatcttatgcctatggaatgggaccttttccagatggtgtataccgtgcagaatttccgtatttatatagaagtcctgaaggaatgccagagagtgaaaccattaattattatatagaaagtattaaaaaagtatttgatcaagcttcaccaccggagtacgtagcagctatagtagtagaaccacttcagggtgaaggcggatttattccagctcccattgaatgggttaaagcagtaagaactatttgtgataaatatggtatattgcttgttgcagatgaggtacaatgtgggttctgccgtacaggtaaaatgtttgcttctgaatattggaaggaagcaggagcagctccagatataatagcaactgcaaaatctattgcagctggtatgccattaagcgcaataacagcaagggaagagattatggaggcagtaagacccggaacaattggaggaaccttctgtggaaatgcagtagcatgtgcagcagcattaaaagtgatagaaattatggaaagagatcatttggctgaccgttctatggaaataggtaagaaagtaatgaaacgctatatggaatggaaagaaaaatatgagattgttggagatgtaagaggactcggcggaatggttggaatagaatttgtaaaaaacaaagaaaagaaagatccaaatcctgaaattgtatcagcagttattcaagaagcagcccaaaatggacttatgattgagaactcgggtgtttatggaaatgttatccgctttttagcaccacttgtaattacagataagcagcttgaagcaggattagatatttttgaaaaagcaatttctaagtgtatgcaaaagtaagttgaggaggtagataatgtctacaacacataacgtccctcagggcgatcttgttttacgtactttagccatgcccgccgataccaatgccaatggtgacatctttggtggttggttaatgtcacaaatggatattggcggcgctattctggcaaaagaaattgcccacggtcgcgtagtgactgtgcgggttgaaggaatgactttcttacggccggttgcggtcggcgatgtggtgtgctgctatgcacgctgtgtccagaaagggacgacatcggtcagcattaatattgaagtgtgggtgaaaaaagtagcgtctgaaccaatcgggcaacggtataaagcgacagaagcattatttaagtatgtcgcggttgatcctgaaggaaaacctcgcgccttacctgttgagtaaaaaggagtgtatataaatggatggcaaagagtatgttcaaaaagttttaagtactgtacaaaaaagaaatttaggtgaagaagaatttcttgatgcggtaaaagaagttttaacttctttagtacctgtatttgatagaagacctgattttattaaagcaggattacttgaaagattaactgaaccagaaagagctataagttttagagtcccatgggttgatgataatggagaggttcaagtaaacagaggttttagaattcaatttaattcggctataggaccgtataagggtgggttaagatttcatccatctgtaaatcaaagtatcgtaaaatttttaggatttgagcaaatatttaagaactccttaacagggttacctatcggaggagcaaaaggcggttcagattttgatccaaaaggcaaatctgataacgaagttatgagattttgtcaagcttttatgtctgagctgtacaagtacataggttctaatagagatgtacctgcaggagatataggtgtcggtggaagagaaattggatatctatatggctattataataaacttaaaggtgtaagtgaacagggtactttgacaggcaagggactgacttatggaggaagtcttgccagaacagaagcaacaggatatggattagtttattttactgaagaaatgctaaaggatcataatttgagtttcaaagataaaaaagtagtagtttcaggttcgggaaatgtggctatttatgctattgaaaaagcaactgaacttggagctaaagttattacttgttctgattctaatggatatattttagatgaaaatggaattaatctagatgtagtaaaagaaattaaagaagttagaaggggaagaataaaagaatatctaaaaagtgtgcctactgctaagtatgtaccagattttagagaaatttggaatgttaagtgtgacatagctcttccttgtgcaactcaaggtgaaataaatgagaaatctgctaaggctcttgtagaaaatggtgttatagctgtatcagaaggagcaaatatgccgtcaactttagatgcaataaatgtatttttaagtaataagattctttttggaccttctaaggcagctaatgcaggaggagttgcatgttctgctattgaaatgtctcagaatagtataaggtattcatggacatttgaagaggtaaataataagatcaaaaatataatgattaatatttataataattctaaaaacgcggcaaaagaatatggaaatgaaggaaatatagttgtaggagccaatattgctggatttttaaaagttgctgaggctatgatggcccaaggcataatttaaaagacattcgggaggaagaatttaaatgggtttctactctatgcctagatatttccaaaatatgcctcaggtgggcaaacccctgaaaaaggcggatgccgccaatgaagaacagctgaaaaagatcgaagaagagatccatcagctgatcaaagaggctcaggaagccggcaaggcagatgctgatgtaaacaagagaggggaactgaccgctctccagagaattgaaaaactggtggaaccgggctcctggagacccctgaacaccctgttcaaccctcagggcaacaagaacggctccgtggccatcgtcaagggcctgggccgtgtaaacggcaaatggtgcgtggtcgtggcttccgacaacaagaagctggccggtgcctgggtgccaggccaggctgaatgcctgctgcgggcttccgataccgccaagaccctgcacgtgcctctggtgtatgtgctgaactgctccggcgttaagttcgacgaacaggaaaaggtataccccaaccgtcgtggcggcggtacgcctttcttccggaacgctgaactgaaccagctgggcattcccgtcatcgttggcatctacggcaccaaccctgccggcggcggctatcattccatcagccccacggtgatcattgcccatgaaaaagccaacatggctgtgggcggcgccggcattatgggcggcatgaaccccaaaggtcatgtggacctggaatatgccaacgaaatcgccgacatggtggaccgtaccggcaagaccgaacctccgggagctgtcgacatccactacaccgaaaccggtttcatgcgtgaagtctatgcttccgaagaaggcgttctggaagggatcaagaagtatgtaggcatgctgccgaaatacgatcctgaattcttccgggtggacgatccgaaagcaccggcattcccggctgacgacctgtacagcatggttcctctgaacgacaaacgggcttatgacatctacaatgtaattgcccgcctgttcgacaacagcgaactccatgaatacaaaaaaggctacggccctgaaatggtcaccggtctggccaaagtcaacggcctgctggtgggcgttgtggccaacgtccagggtctcctgatgaactaccctgaatacaaggctgcaggctccgtagggatcggcggcaaactgtaccgccagggtctggtgaaaatgaatgaattcgtcaccctgtgcgccagagaccgtctgcccatcgtctggatccaggataccaccgggatcgatgtgggcaacgatgcggaaaaggctgaactgctgggtctgggccagtccctgatctactccatccagacttcccacatccctcaattcgaaattaccctgagaaaaggcacggctgctgcccactacgtactgggcgggcctcagggcaatgacaccaacgccttctccatcggtaccgctgctacggaaatcgccgttatgaacggtgaaaccgctgccaccgccatgtactcccggagactggccaaagaccggaaagccggcaaggatctgcagccgaccatcgacaagatgaacaacctgatccaggctttctacaccaaatctcgtccgaaagtctgtgctgaactgggtctggtggatgaaatcgtggacatgaacaagatccgcgggtatgtggaagccttcacggaagctgcttatcagaatccggaaagcatctgcccgttccatcagatgattctgcctcgtgccatcagagagtttgagactttcgtaaagaaataatccttacaaggaggatctacaatgaccgacaatccttggctgattatgatgatcaacatgaccatcgtattcggtgtgctgattgtgctgggaatcctgatggtgctgatccatgctgtcgatcccaccaagaaagttcagggaaaaaaaaagcctgtagttgctaagccggcgccttccgctgctgccagcaaacggcaggaagaggaaaaagtggctgccatggcagctgtcctggccctggtccaggatgaagacgatatgattgcagctgccctgagtgctgccatcgccgaacacaaaagaaaaatggagccgatgaatctgccccatcattctttctgatgaactgttgagggacggttcattatccacaaaatcaaacaacttgaaaactgtttaggagggattctcatgagaaaattcaatgttaacgttaacggtactgtttacactgtagaagttgaagaagtcggcggcgctgtaactgcagctcctgctgctcctgccgctcctgccgctgctcctgctgccgctcctgtagctgctgctcctgctgctgctcccgctccggctcctgccgctgctcctgctgctgctcccgctccggctgccaaaccggccgctgctgctcctgccggctccgtaaccgtatccgctcccatgcccggcaagatcctgtccgttaacgtaaaacccggcgacaaagtggaagccggcgatgttctgctgatcctggaagctatgaagatgcagaacgaaatcatggctcctgaagacggcacggtttccgaagtccgcgtaaacgctggcgataccgtagccaccggcgacgtaatggttattctctaatcaacgtctccgaacataaaggaggattttagaacatggatgcttttgtggtagccctgacctctgtcatccaggacagtgggtttgtggcttttacctggggcaatgccgtaatgatgctggtcgggtgcatcctgctgtacctggccatcgtcaaaggctttgaacccctgctgctgagcccgatcgccttcgggtgcattctggccaacgtaccccggaccgggttcgaaaccgaccccggcgtcatgcagctgatcctgggcgggatcaaatacgaaatcttccctccgctgattttcatgggcgtaggggccatgaccgactttggtccgctgattgccaaccccaagaccctgctgctgggcgctgctgcccagatcggcgtgttcgtggctctgctgggggccatgctcctgggcttcaatgtgaaggaagcttccgccatcgggatcatcggtggtgctgacggcccgacttccatttacctggcttccaagatggctccccatctgctgggcgccatcgccgtggccgcttattcctacatgtccctggtgcccctgatccagccgcctgtgatgaaactgttcacctccaaggaagaacggaagatcaaaatggcccagctgcgtacggtgacccactttgaaaaagtggtgttccccattgtcaccaccattttcatttccctgctgctgccttccgtatgctctttgatcgggatgctgatgctggggaacctgttcaccgaatccggctgtatggaccgtctgtctgacacggcacagaatgccctgatgaacagcgtgaccatcatgctggccaccggtaccggcctgaccatgaaggccgaaagcttcctgaccttgcagaccatcgaaatcatctgcctgggtctggttgcctttatcggcggcaccgccggcggtgtgctgttcggcaagctgatgagcaagctggacggcggcaagaccaacccgctgattggttctgccggtgtatccgcagtgcctatggctgcccgtgtgtcccaggttgtgggacagcaggctgaccctggcaacttcctgctgatgcacgccatgggccccaatgtggccggggttatcggtacggctgttgcagctggtaccatgctggccatggtgggcggcaaataaagtcaaggaggagcataatggagtgggaagagatatataaagagaaactggtaactgcagaaaaagctgtttcaaaaatagaaaaccatagcagggtagtttttgcacatgcagtaggagaacccgtagatttagtaaatgcactagttaaaaataaggataattatataggactagaaatagttcacatggtagctatgggcaaaggtgaatatacaaaagagggtatgcaaagacattttagacataatgctttatttgtaggcggatgtactagagatgcagtaaattcaggaagagcagattatacaccttgttttttctatgaagtgccaagtttgtttaaagaaaaacgtttgcctgtagatgtagcacttattcaggtaagtgagccagataaatatggctactgcagttttggagtttccaatgactataccaagccagcagcagaaagtgctaagcttgtaattgcagaagtgaataaaaacatgccaagaactcttggagattcttttatacatgtatcagatattgattatatagtggaagcttcacacccattgttagaattgcagcctcctaaattgggagatgtagaaaaagccataggagaaaactgtgcatctttaattgaagatggagctactcttcagcttggaataggtgctataccagatgcggtacttttattcttaaagaacaaaaagaatttaggaatacattctgagatgatatcagatggtgtgatggaactggtgaaggcaggggttatcaataacaagaaaaagaccctccatccaggcaaaatagttgtaacatttttaatgggaacaaaaaaattatatgattttgtaaacaataatccaatggtagaaacttattctgtagattatgtaaataatccactggtaattatgaaaaatgacaatatggtttcaataaattcttgtgttcaagtagacttaatgggacaagtatgttctgaaagtataggattgaaacagataagtggagtgggaggccaggtagattttattagaggagctaatctatcaaagggtggaaaggctattatagctataccttccacagctggaaaaggaaaagtttcaagaataactccacttctagatactggtgctgcagttacaacttctagaaatgaagtagattatgtagttactgaatatggtgttgctcatcttaagggcaaaactttaagaaatagggcaagagctctaataaatatcgctcatccaaaattcagagaatcattaatgaatgaatttaaaaagagattttagagattaaggaggactacgaatgtctttaatgactggggaagaatatgtagaaagtttacgtaaattaaaattaaacgtttattatctgggagagaaaatagataatccagtggataaccctgtacttcgtccatctttaaattctgttaagatgacttatgacttggcccaagaagcagaatatgaggatttaatgacaacaacatcaaatataacaggtgaaaaaataaatagatttacaaatttacatcaaagcagtgaagatttggtaaaaaaagttaaaatgcagagattgtgcggacaaaaaactgcagcctgtttccaaagatgcgttggtatggactcatttaatgcagtgtacagtactacttttgaaatagataaggaatataatacaaattattttgaaaatttcaagaaatttttaacttatgttcaaaagaacgatttaacagtagatggagctatgacagatccaaaaggagacagaggattgtcaccaagcaaacaggctgatccagatttatatttaagagttgtagaaagaagagaagacggtgtagttgtaagaggagcaaaggctcaccagacaggtatatgtaattctcatgaagtattggttatgccaactattgctatgagaccggatgataaagattatgcaatagctttttctgttcctacagatgcagaaggaataactatgataattggaagacagtcctgtgatactagaaaaatggaaaaagatgcggacatagatgttggtaataaagaatttggcggagtagaagcattagtagtatttgacgatgtatttgttccaaatgacaggatattcttaaatggtgaaactgaatatgcaggaatgttagtagagagatttgcaggatatcatagacaaagttatggtggatgcaaagtaggagtgggagatgtattgataggcgctgctgcagtggctgcagactataatggagctgcaaaggcatctcacataaaggataaattaatagaaatgatgcatttaaatgaaactctttacgcttgcggaattgcgtgctcagcagaaggacatgcaacaaaagctggaaattaccaaatagacttgcttcttgcaaatgtatgtaagcaaaatataacaagattcccttatgaaattgtgagattagcagaagatatagcaggaggattaatggttactatgccttctgaaaaggattataagagtccagaggttggaaaatatgtagagaagtacttggtgggagttgcatccgtacctgttgaagacagaatgaagatattaagattattagaaaatatatgtcttggaacggctgcagtaggatatagaactgaatccatgcatggagcaggttcacctcaagcacagagaataatgatatcaagacagggaaacctagcacataagaagaaacttgcaaagaagatagctagaatagaagattaagctatcataaaaataagaagcctgcatttgcaggcttcttatttttat

SEQ ID NO: 34 - DNA, 26328 bp, artificial sequence
  plasmid SG539
aaggccagcaaaaggccaggaaccgtaaaaaggccgcgttgctggcgtttttccataggctccgcccccctgacgagcatcacaaaaatcgacgctcaagtcagaggtggcgaaacccgacaggactataaagataccaggcgtttccccctggaagctccctcgtgcgctctcctgttccgaccctgccgcttaccggatacctgtccgcctttctcccttcgggaagcgtggcgctttctcatagctcacgctgtaggtatctcagttcggtgtaggtcgttcgctccaagctgggctgtgtgcacgaaccccccgttcagcccgaccgctgcgccttatccggtaactatcgtcttgagtccaacccggtaagacacgacttatcgccactggcagcagccactggtaacaggattagcagagcgaggtatgtaggcggtgctacagagttcttgaagtggtggcctaactacggctacactagaagaacagtatttggtatctgcgctctgctgaagccagttaccttcggaaaaagagttggtagctcttgatccggcaaacaaaccaccgctggtagcggtggtttttttgtttgcaagcagcagattacgcgcagaaaaaaaggatctcaagaagatcctttgatcttttctacggggtctgacgctcagtggaacgaaaactcacgttaagggattttggtcatgagattatcaaaaaggatcttcacctagatccttttaaattaaaaatgaagttttaaatcaatctaaagtatatatgagtaaacttggtctgacagctcttcctttttcaatattattgaagcatttatcagggttattgtctcatgagcggatacatatttgaatgtatttagaaaaataaacaaataggggttccgcgcacatttccccgaaaagtgccacctgacggtcctgcatcagctcttatatattaagctaccaacttagtatataagccaaaacttaaatgtgctaccaacacatcaagccgttagagaactctatctatagcaatatttcaaatgtaccgacatacaagagaaacattaactatatatattcaatttatgagattatcttaacagatataaatgtaaattgcaataagtaagatttagaagtttatagcctttgtgtattggaagcagtacgcaaaggcttttttatttgataaaaattagaagtatatttattttttcataattaatttatgaaaatgaaagggggtgagcaaagtgacagaggaaagcagtatcttatcaaataacaaggtattagcaatatcattattgactttagcagtaaacattatgacttttatagtgcttgtagctaagtagtacgaaagggggagctttaaaaagctccttggaatacatagaattcataaattaatttatgaaaagaagggcgtatatgaaaacttgtaaaaattgcaaagagtttattaaagatactgaaatatgcaaaatacattcgttgatgattcatgataaaacagtagcaacctattgcagtaaatacaatgagtcaagatgtttacataaagggaaagtccaatgtattaattgttcaaagatgaaccgatatggatggtgtgccataaaaatgagatgttttacagaggaagaacagaaaaaagaacgtacatgcattaaatattatgcaaggagctttaaaaaagctcatgtaaagaagagtaaaaagaaaaaataatttatttattaatttaatattgagagtgccgacacagtatgcactaaaaaatatatctgtggtgtagtgagccgatacaaaaggatagtcactcgcattttcataatacatcttatgttatgattatgtgtcggtgggacttcacgacgaaaacccacaataaaaaaagagttcggggtagggttaagcatagttgaggcaactaaacaatcaagctaggatatgcagtagcagaccgtaaggtcgttgtttaggtgtgttgtaatacatacgctattaagatgtaaaaatacggataccaatgaagggaaaagtataatttttggatgtagtttgtttgttcatctatgggcaaactacgtccaaagccgtttccaaatctgctaaaaagtatatcctttctaaaatcaaagtcaagtatgaaatcataaataaagtttaattttgaagttattatgatattatgtttttctattaaaataaattaagtatatagaatagtttaataatagtatatacttaatgtgataagtgtctgacagtgtcacagaaaggatgattgttatggattataagcggccggccagtgggcaagttgaaaaattcacaaaaatgtggtataatatctttgttcattagagcgataaacttgaatttgagagggaacttagatggtatttgaaaaaattgataaaaatagttggaacagaaaagagtattttgaccactactttgcaagtgtaccttgtacctacagcatgaccgttaaagtggatatcacacaaataaaggaaaagggaatgaaactatatcctgcaatgctttattatattgcaatgattgtaaaccgccattcagagtttaggacggcaatcaatcaagatggtgaattggggatatatgatgagatgataccaagctatacaatatttcacaatgatactgaaacattttccagcctttggactgagtgtaagtctgactttaaatcatttttagcagattatgaaagtgatacgcaacggtatggaaacaatcatagaatggaaggaaagccaaatgctccggaaaacatttttaatgtatctatgataccgtggtcaaccttcgatggctttaatctgaatttgcagaaaggatatgattatttgattcctatttttactatggggaaatattataaagaagataacaaaattatacttcctttggcaattcaagttcatcacgcagtatgtgacggatttcacatttgccgttttgtaaacgaattgcaggaattgataaatagttaacttcaggtttgtctgtaactaaaaacaagtatttaagcaaaaacatcgtagaaatacggtgttttttgttaccctaagtttgttaagggatgcataaactgcatcccttaacttgtttttcgtgtacctattttttgtgaatcgattatgtcttttgcgcattcgtcgacaattgcatatattgataaaaataataatagtgggtataattaagttgttaggaggttagttagagtgaaaccagtaacgttatacgatgtcgcagagtatgccggtgtctcttatcagaccgtttcccgcgtggtgaaccaggccagccacgtttctgcgaaaacgcgggaaaaagtggaagcggcgatggcggagctgaattacattcccaaccgcgtggcacaacaactggcgggcaaacagtcgttgctgattggcgttgccacctccagtctggccctgcacgcgccgtcgcaaattgtcgcggcgattaaatctcgcgccgatcaactgggtgccagcgtggtggtgtcgatggtagaacgaagcggcgtcgaagcctgtaaagcggcggtgcacaatcttctcgcgcaacgcgtcagtgggctgatcattaactatccgctggatgaccaggatgccattgctgtggaagctgcctgcactaatgttccggcgttatttcttgatgtctctgaccagacacccatcaacagtattattttctcccatgaagacggtacgcgactgggcgtggagcatctggtcgcattgggtcaccagcaaatcgcgctgttagcgggcccattaagttctgtctcggcgcgtctgcgtctggctggctggcataaatatctcactcgcaatcaaattcagccgatagcggaacgggaaggcgactggagtgccatgtccggttttcaacaaaccatgcaaatgctgaatgagggcatcgttcccactgcgatgctggttgccaacgatcagatggcgctgggcgcaatgcgcgccattaccgagtccgggctgcgcgttggtgcggacatctcggtagtgggatacgacgataccgaagacagctcatgttatatcccgccgttaaccaccatcaaacaggattttcgcctgctggggcaaaccagcgtggaccgcttgctgcaactctctcagggccaggcggtgaagggcaatcagctgttgcccgtctcactggtgaaaagaaaaaccaccctggcgcccaatacgcaaaccgcctctccccgcgcgttggccgattcattaatgcagctggcacgacaggtttcccgactggaaagcgggcagtgagcgcaacgcaattaatgtaagttagctcactcattaggcaccgggatctcgaccgatgcccttgagagccttcaacccagtcagctccttccggtgggcgcggggcatgactagcatgatcgtgctcctgtcgttgaggacccggctaggctggcggggttgccttactggttagcagaatgaatcaccgatacgcggctcagctagcacccggaattgtgagcggataacaattccttggaattgtgagcggataacaattataattaagttgttaggaggttagaatgagtctgaatttccttgattttgaacagccgattgcagagctggaagcgaaaatcgattctctgactgcggttagccgtcaggatgagaaactggatattaacatcgatgaagaagtgcatcgtctgcgtgaaaaaagcgtagaactgacacgtaaaatcttcgccgatctcggtgcatggcagattgcgcaactggcacgccatccacagcgtccttataccctggattacgttcgcctggcatttgatgaatttgacgaactggctggcgaccgcgcgtatgcagacgataaagctatcgtcggtggtatcgcccgtctcgatggtcgtccggtgatgatcattggtcatcaaaaaggtcgtgaaaccaaagaaaaaattcgccgtaactttggtatgccagcgccagaaggttaccgcaaagcactgcgtctgatgcaaatggctgaacgctttaagatgccaatcatcacctttatcgacaccccgggggcttatccgggcgtgggcgcagaagagcgcggtcagtctgaagccattgcacgcaacctgcgtgaaatgtctcgccttagcgtaccgactatttgtaccgttatcggtgaaggtggttctggcggcgcgctggcgattggcgtgggcgataaagtgaatatgctgcaatacagcacctattccgttatctcgccggaaggttgtgcgtccattctgtggaagagcgctgataaagcgccgctggcggctgaagcgatgggtatcatcgctccgcgtctgaaagaactaaaactgatcgactccatcatcccagaaccgctgggtggtgctcaccgtaacccggaagcgatggcggcatcgttgaaagcgcaactgttggcggatctggccgatctcgacgtgttaagcactgaagatttaaaaaatcgtcgttatcagcgcctgatgagctacggttacgcgtaataaggaggaacccactcatggatattcgtaagattaaaaaactgatcgagctggttgaagaatcaggcatctccgaactggaaatttctgaaggcgaagagtcagtacgcattagccgtgcagctcctgccgcaagtttccctgtgatgcaacaagcttacgctgcaccaatgatgcagcagccagctcaatctaacgcagccgctccggcgaccgttccttccatggaagcgccagcagcagcggaaatcagtggtcacatcgtacgttccccgatggttggtactttctaccgcaccccaagcccggacgcaaaagcgttcatcgaagtgggtcagaaagtcaacgtgggcgataccctgtgcatcgttgaagccatgaaaatgatgaaccagatcgaagcggacaaatccggtaccgtgaaagcaattctggtcgaaagtggacaaccggtagaatttgacgagccgctggtcgtcatcgagtaacgaggcgaacatgctggataaaattgttattgccaaccgcggcgagattgcattgcgtattcttcgtgcctgtaaagaactgggcatcaagactgtcgctgtgcactccagcgcggatcgcgatctaaaacacgtattactggcagatgaaacggtctgtattggccctgctccgtcagtaaaaagttatctgaacatcccggcaatcatcagcgccgctgaaatcaccggcgcagtagcaatccatccgggttacggcttcctctccgagaacgccaactttgccgagcaggttgaacgctccggctttatcttcattggcccgaaagcagaaaccattcgcctgatgggcgacaaagtatccgcaatcgcggcgatgaaaaaagcgggcgtcccttgcgtaccgggttctgacggcccgctgggcgacgatatggataaaaaccgtgccattgctaaacgcattggttatccggtgattatcaaagcctccggcggcggcggcggtcgcggtatgcgcgtagtgcgcggcgacgctgaactggcacaatccatctccatgacccgtgcggaagcgaaagctgctttcagcaacgatatggtttacatggagaaatacctggaaaatcctcgccacgtcgagattcaggtactggctgacggtcagggcaacgctatctatctggcggaacgtgactgctccatgcaacgccgccaccagaaagtggtcgaagaagcgccagcaccgggcattaccccggaactgcgtcgctacatcggcgaacgttgcgctaaagcgtgtgttgatatcggctatcgcggtgcaggtactttcgagttcctgttcgaaaacggcgagttctatttcatcgaaatgaacacccgtattcaggtagaacacccggttacagaaatgatcaccggcgttgacctgatcaaagaacagctgcgtatcgctgccggtcaaccgctgtcgatcaagcaagaagaagttcacgttcgcggccatgcggtggaatgtcgtatcaacgccgaagatccgaacaccttcctgccaagtccgggcaaaatcacccgtttccacgcacctggcggttttggcgtacgttgggagtctcatatctacgcgggctacaccgtaccgccgtactatgactcaatgatcggtaagctgatttgctacggtgaaaaccgtgacgtggcgattgcccgcatgaagaatgcgctgcaggagctgatcatcgacggtatcaaaaccaacgttgatctgcagatccgcatcatgaatgacgagaacttccagcatggtggcactaacatccactatctggagaaaaaactcggtcttcaggaaaaataatataggaggatataacatgagctggattgaacgaattaaaagcaacattactcccacccgcaaggcgagcattcctgaaggggtgtggactaagtgtgatagctgcggtcaggttttataccgcgctgagctggaacgtaatcttgaggtctgtccgaagtgtgaccatcacatgcgtatgacagcgcgtaatcgcctgcatagcctgttagatgaaggaagccttgtggagctgggtagcgagcttgagccgaaagatgtgctgaagtttcgtgactccaagaagtataaagaccgtctggcatctgcgcagaaagaaaccggcgaaaaagatgcgctggtggtgatgaaaggcactctgtatggaatgccggttgtcgctgcggcattcgagttcgcctttatgggcggttcaatggggtctgttgtgggtgcacgtttcgtgcgtgccgttgagcaggcgctggaagataactgcccgctgatctgcttctccgcctctggtggcgcacgtatgcaggaagcactgatgtcgctgatgcagatggcgaaaacctctgcggcactggcaaaaatgcaggagcgcggcttgccgtacatctccgtgctgaccgacccgacgatgggcggtgtttctgcaagtttcgccatgctgggcgatctcaacatcgctgaaccgaaagcgttaatcggctttgccggtccgcgtgttatcgaacagaccgttcgcgaaaaactgccgcctggattccagcgcagtgaattcctgatcgagaaaggcgcgatcgacatgatcgtccgtcgtccggaaatgcgcctgaaactggcgagtattctggcgaagttgatgaatctgccagcgccgaatcctgaagcgccgcgtgaaggcgtagtggtacccccggtaccggatcaggaacctgaggcctgagactaggaggatcttaaatgaccgacgtccgattccgcattatcggtacgggtgcctacgtaccggaacggatcgtctccaacgatgaagtcggcgcgccggccggggtggacgacgactggatcacccgcaagaccggtatccggcagcgtcgctgggccgccgacgaccaggccacctcggacctggccacggccgcggggcgggcagcgctgaaagcggcgggcatcacgcccgagcagctgaccgtgatcgcggtcgccacctccacgccggaccggccgcagccgcccacggcggcctatgtccagcaccacctcggtgcgaccggcactgcggcgttcgacgtcaacgcggtctgctccggcaccgtgttcgcgctgtcctcggtggcgggcaccctcgtgtaccggggcggttacgcgctggtcatcggcgcggacctgtactcgcgcatcctcaacccggccgaccgcaagacggtcgtgctgttcggggacggcgccggcgcaatggtcctcgggccgacctcgaccggcacgggccccatcgtccggcgcgtcgccctgcacaccttcggcggcctcaccgacctgatccgtgtgcccgcgggcggcagccgccagccgctggacacggatggcctcgacgcgggactgcagtacttcgcgatggacgggcgtgaggtgcgccgcttcgtcacggagcacctgccgcagctgatcaagggcttcctgcacgaggccggggtcgacgccgccgacatcagccacttcgtgccgcatcaggccaacggtgtcatgctcgacgaggtcttcggcgagctgcatctgccgcgggcgaccatgcaccggacggtcgagacctacggcaacacgggagcggcctccatcccgatcaccatggacgcggccgtgcgcgccggttccttccggccgggcgagctggtcctgctggccgggttcggcggcggcatggccgcgagcttcgccctgatcgagtggtagtagggaggtctgtttaatgaaaaaggtatgtgttataggtgcaggtactatgggttcaggaattgctcaggcatttgcagctaaaggatttgaagtagtattaagagatattaaagatgaatttgttgatagaggattagattttatcaataaaaatctttctaaattagttaaaaaaggaaagatagaagaagctactaaagttgaaatcttaactagaatttccggaacagttgaccttaatatggcagctgattgcgatttagttatagaagcagctgttgaaagaatggatattaaaaagcagatttttgctgacttagacaatatatgcaagccagaaacaattcttgcatcaaatacatcatcactttcaataacagaagtggcatcagcaactaaaagacctgataaggttataggtatgcatttctttaatccagctcctgttatgaagcttgtagaggtaataagaggaatagctacatcacaagaaacttttgatgcagttaaagagacatctatagcaataggaaaagatcctgtagaagtagcagaagcaccaggatttgttgtaaatagaatattaataccaatgattaatgaagcagttggtatattagcagaaggaatagcttcagtagaagacatagataaagctatgaaacttggagctaatcacccaatgggaccattagaattaggtgattttataggtcttgatatatgtcttgctataatggatgttttatactcagaaactggagattctaagtatagaccacatacattacttaagaagtatgtaagagcaggatggcttggaagaaaatcaggaaaaggtttctacgattattcaaaataagtttacaagaatccctttaggaggattagtcatggaactaaacaatgtcatccttgaaaaggaaggtaaagttgctgtagttaccattaacagacctaaagcattaaatgcgttaaatagtgatacactaaaagaaatggattatgttataggtgaaattgaaaatgatagcgaagtacttgcagtaattttaactggagcaggagaaaaatcatttgtagcaggagcagatatttctgagatgaaggaaatgaataccattgaaggtagaaaattcgggatacttggaaataaagtgtttagaagattagaacttcttgaaaagcctgtaatagcagctgttaatggttttgctttaggaggcggatgcgaaatagctatgtcttgtgatataagaatagcttcaagcaacgcaagatttggtcaaccagaagtaggtctcggaataacacctggttttggtggtacacaaagactttcaagattagttggaatgggcatggcaaagcagcttatatttactgcacaaaatataaaggcagatgaagcattaagaatcggacttgtaaataaggtagtagaacctagtgaattaatgaatacagcaaaagaaattgcaaacaaaattgtgagcaatgctccagtagctgttaagttaagcaaacaggctattaatagaggaatgcagtgtgatattgatactgctttagcatttgaatcagaagcatttggagaatgcttttcaacagaggatcaaaaggatgcaatgacagctttcatagagaaaagaaaaattgaaggcttcaaaaatagataggctcagctagcacccggaattgtgagcggataacaattccttggaattgtgagcggataacaattataattaagttgttaggaggttagaatgactcagcgcattgcgtatgtgaccggcggcatgggtggtatcggaaccgccatttgccagcggctggccaaggatggctttcgtgtggtggccggttgcggccccaactcgccgcgccgcgaaaagtggctggagcagcagaaggccctgggcttcgatttcattgcctcggaaggcaatgtggctgactgggactcgaccaagaccgcattcgacaaggtcaagtccgaggtcggcgaggttgatgtgctgatcaacaacgccggtatcacccgcgacgtggtgttccgcaagatgacccgcgccgactgggatgcggtgatcgacaccaacctgacctcgctgttcaacgtcaccaagcaggtgatcgacggcatggccgaccgtggctggggccgcatcgtcaacatctcgtcggtgaacgggcagaagggccagttcggccagaccaactactccaccgccaaggccggcctgcatggcttcaccatggcactggcgcaggaagtggcgaccaagggcgtgaccgtcaacacggtctctccgggctatatcgccaccgacatggtcaaggcgatccgccaggacgtgctcgacaagatcgtcgcgacgatcccggtcaagcgcctgggcctgccggaagagatcgcctcgatctgcgcctggttgtcgtcggaggagtccggtttctcgaccggcgccgacttctcgctcaacggcggcctgcatatgggctgaacaggaggcaataaatgagcgcacaatccctggaagtaggccagaaggcccgtctcagcaagcggttcggggcggcggaggtagccgccttcgccgcgctctcggaggacttcaaccccctgcacctggacccggccttcgccgccaccacggcgttcgagcggcccatagtccacggcatgctgctcgccagcctcttctccgggctgctgggccagcagttgccgggcaaggggagcatctatctgggtcaaagcctcagcttcaagctgccggtctttgtcggggacgaggtgacggccgaggtggaggtgaccgcccttcgcgaggacaagcccatcgccaccctgaccacccgcatcttcacccaaggcggcgccctcgccgtgacgggggaagccgtggtcaagctgccttaagttgaggaggtagataatgtctacaacacataacgtccctcagggcgatcttgttttacgtactttagccatgcccgccgataccaatgccaatggtgacatctttggtggttggttaatgtcacaaatggatattggcggcgctattctggcaaaagaaattgcccacggtcgcgtagtgactgtgcgggttgaaggaatgactttcttacggccggttgcggtcggcgatgtggtgtgctgctatgcacgctgtgtccagaaagggacgacatcggtcagcattaatattgaagtgtgggtgaaaaaagtagcgtctgaaccaatcgggcaacggtataaagcgacagaagcattatttaagtatgtcgcggttgatcctgaaggaaaacctcgcgccttacctgttgagtaaaaaggagtgtatataaatgagtttaacacaaggcatgaaagcaaaacagttgttagcctactttcagggaaaggctgatcaagatgcaagagaagcaaaagcaagaggcgaacttgtttgttggtctgcttccgtagctccccctgaattctgcgtgacaatgggtatcgcaatgatttatcctgagacccacgcagcaggtattggcgcaagaaaaggcgcaatggacatgttggaagttgctgatagaaaaggctacaatgttgactgctgttcttacggcagagtaaacatgggttacatggaatgcctgaaggaagctgcaattacaggtgtaaaacctgaggttttggtcaactctcctgcagcagacgttcctctgcctgacttggtaatcacatgtaataacatttgtaatacattgttgaaatggtatgaaaaccttgcggcagaattagacattccttgcatcgttatcgacgttcctttcaaccacacaatgcctattcctgaatatgcaaaagcttacattgcagatcagtttagaaatgcaatttctcagctggaagtaatctgtggtagaccttttgactggaagaagtttaaagaagttaaagatcagacacagcgttctgtataccactggaacagaattgcagaaatggctaaatataaaccatcacctttgaatggcttcgacttgtttaattacatggcattgatcgttgcttgccgttctttggattatgctgaaattacattcaaagcatttgctgatgaattagaagaaaacttgaaggctggtatctatgcattcaagggcgctgaaaagactcgtttccaatgggaaggtattgctgtatggcctcacttgggtcacacattcaagtccatgaagaacctcaattctatcatgacaggtacagcttaccctgcactttgggatttgcactatgatgcaaacgatgaatctatgcactctatggcagaagcttatacaagaatttatattaacacatgcttacagaacaaagttgaagttttgttgggcatcatggaaaaaggccaggttgacggtacagtttatcacttgaacagaagctgtaagttgatgagcttcctgaacgttgaaacagctgaaattatcaaagaaaagaatggtttgccttatgtaagcatcgatggtgaccagacagatcctcgcgtattctctcccgcacagtttgatacacgtgttcaggcactggttgaaatgatggaagccaacatggctgcagcagaataaatcacaaggaggatcacatgagtagagtagaagctattttatcccaattaaaagacgttgccgcaaatcctaaaaaggcaatggatgattataaggcggaaacaggtaagggtgcagtaggtattatgcctatttactcccctgaagaaatggtacacgcagctggttatttgcctatgggtatctggggtgcacaaggtaaaacaatttccaaggctcgtacatatcttcctgcatttgcttgttcagttatgcagcaggttatggaactgcagtgtgaaggcgcttatgatgacctttctgctgtaattttctctgtaccttgtgatacattaaagtgcttaagccagaaatggaaaggcacatcccctgtaattgtatttacacatcctcagaacagaggcttggaagctgcaaatcagttcttagtaacagagtatgaattggtaaaggctcagcttgaatcagttttgggtgtaaaaatttcaaacgctgctttggagaattccattgcaatttacaatgaaaacagagcagttatgcgtgaatttgtaaaggttgcagctgattaccctcaggtaattgatgcagttagccgtcatgctgttttcaaagcaagacagttcatgttaaaagaaaaacacacagcacttgtaaaagagctcattgctgaaattaaggctacacctgttcagccttgggatggcaagaaagttgttgttacaggtatcttacttgagcccaacgaattgcttgatatcttcaatgaattcaaaattgctatcgttgatgacgatttggctcaggaatccagacagattcgtgttgacgttctggatggcgaaggtggccctctttatagaatggcaaaagcttggcagcaaatgtacggttgctctcttgcaactgatacaaagaaaggccgcggcagaatgctgatcaacaagacaattcagacaggtgcagatgctatcgttgttgcgatgatgaaattctgtgatcctgaagaatgggattaccctgtaatgtacagagaatttgaagaaaaaggcgttaagagtctgatgatcgaagttgatcaggaagtttcttccttcgaacagatcaagacaagactgcagtctttcgtagaaatgctgtaaagtataggaggactacatgagcggaacaggacgactggcaggaaagattgcgttaattaccggtggcgccggcaatatcggcagtgaattgacacgtcgctttctcgcagagggagcgacggtcattattagtggacggaatcgggcgaagttgaccgcactggccgaacggatgcaggcagaggcaggagtgccggcaaagcgcatcgatctcgaagtcatggatgggagtgatccggtcgcggtacgtgccggtatcgaagcgattgtggcccgtcacggccagatcgacattctggtcaacaatgcaggaagtgccggtgcccagcgtcgtctggccgagattccactcactgaagctgaattaggccctggcgccgaagagacgcttcatgccagcatcgccaatttacttggtatgggatggcatctgatgcgtattgcggcacctcatatgccggtaggaagtgcggtcatcaatgtctcgaccatcttttcacgggctgagtactacgggcggattccgtatgtcacccctaaagctgctcttaatgctctatctcaacttgctgcgcgtgagttaggtgcacgtggcatccgcgttaatacgatctttcccggcccgattgaaagtgatcgcatccgtacagtgttccagcgtatggatcagctcaaggggcggcccgaaggcgacacagcgcaccattttttgaacaccatgcgattgtgtcgtgccaacgaccagggcgcgcttgaacgtcggttcccctccgtcggtgatgtggcagacgccgctgtctttctggccagtgccgaatccgccgctctctccggtgagacgattgaggttacgcacggaatggagttgccggcctgcagtgagaccagcctgctggcccgtactgatctgcgcacgattgatgccagtggccgcacgacgctcatctgcgccggcgaccagattgaagaggtgatggcgctcaccggtatgttgcgtacctgtgggagtgaagtgatcatcggcttccgttcggctgcggcgctggcccagttcgagcaggcagtcaatgagagtcggcggctggccggcgcagactttacgcctcccattgccttgccactcgatccacgcgatccggcaacaattgacgctgtcttcgattgggccggcgagaataccggcgggattcatgcagcggtgattctgcctgctaccagtcacgaaccggcaccgtgcgtgattgaggttgatgatgagcgggtgctgaattttctggccgatgaaatcaccgggacaattgtgattgccagtcgcctggcccgttactggcagtcgcaacggcttacccccggcgcacgtgcgcgtgggccgcgtgtcatttttctctcgaacggtgccgatcaaaatgggaatgtttacggacgcattcaaagtgccgctatcggtcagctcattcgtgtgtggcgtcacgaggctgaacttgactatcagcgtgccagcgccgccggtgatcatgtgctgccgccggtatgggccaatcagattgtgcgcttcgctaaccgcagccttgaagggttagaatttgcctgtgcctggacagctcaattgctccatagtcaacgccatatcaatgagattaccctcaacatccctgccaacattagcgccaccaccggcgcacgcagtgcatcggtcggatgggcggaaagcctgatcgggttgcatttggggaaagttgccttgattaccggtggcagcgccggtattggtgggcagatcgggcgcctcctggctttgagtggcgcgcgcgtgatgctggcagcccgtgatcggcataagctcgaacagatgcaggcgatgatccaatctgagctggctgaggtggggtataccgatgtcgaagatcgcgtccacattgcaccgggctgcgatgtgagtagcgaagcgcagcttgcggatcttgttgaacgtaccctgtcagcttttggcaccgtcgattatctgatcaacaacgccgggatcgccggtgtcgaagagatggttatcgatatgccagttgagggatggcgccataccctcttcgccaatctgatcagcaactactcgttgatgcgcaaactggcgccgttgatgaaaaaacagggtagcggttacatccttaacgtctcatcatactttggcggtgaaaaagatgcggccattccctaccccaaccgtgccgattacgccgtctcgaaggctggtcagcgggcaatggccgaagtctttgcgcgcttccttggcccggagatacagatcaatgccattgcgccgggtccggtcgaaggtgatcgcttgcgcggtaccggtgaacgtcccggcctctttgcccgtcgggcgcggctgattttggagaacaagcggctgaatgagcttcacgctgctcttatcgcggctgcgcgcaccgatgagcgatctatgcacgaactggttgaactgctcttacccaatgatgtggccgcactagagcagaatcccgcagcacctaccgcgttgcgtgaactggcacgacgttttcgcagcgaaggcgatccggcggcatcatcaagcagtgcgctgctgaaccgttcaattgccgctaaattgctggctcgtttgcataatggtggctatgtgttgcctgccgacatctttgcaaacctgccaaacccgcccgatcccttcttcacccgagcccagattgatcgcgaggctcgcaaggttcgtgacggcatcatggggatgctctacctgcaacggatgccgactgagtttgatgtcgcaatggccaccgtctattaccttgccgaccgcaatgtcagtggtgagacattccacccatcaggtggtttgcgttacgaacgcacccctaccggtggcgaactcttcggcttgccctcaccggaacggctggcggagctggtcggaagcacggtctatctgataggtgaacatctgactgaacaccttaacctgcttgcccgtgcgtacctcgaacgttacggggcacgtcaggtagtgatgattgttgagacagaaaccggggcagagacaatgcgtcgcttgctccacgatcacgtcgaggctggtcggctgatgactattgtggccggtgatcagatcgaagccgctatcgaccaggctatcactcgctacggtcgcccagggccggtcgtctgtacccccttccggccactgccgacggtaccactggtcgggcgtaaagacagtgactggagcacagtgttgagtgaggctgaatttgccgagttgtgcgaacaccagctcacccaccatttccgggtagcgcgcaagattgccctgagtgatggtgccagtctcgcgctggtcactcccgaaactacggctacctcaactaccgagcaatttgctctggctaacttcatcaaaacgacccttcacgcttttacggctacgattggtgtcgagagcgaaagaactgctcagcgcattctgatcaatcaagtcgatctgacccggcgtgcgcgtgccgaagagccgcgtgatccgcacgagcgtcaacaagaactggaacgttttatcgaggcagtcttgctggtcactgcaccactcccgcctgaagccgatacccgttacgccgggcggattcatcgcggacgggcgattaccgtgtaaaatcataggaggatcaacatgatcgacactgcgccccttgccccaccacgggcgccccgctctaatccgattcgggatcgagttgattgggaagctcagcgcgctgctgcgctggcagatcccggtgcctttcatggcgcgattgcccggacagttatccactggtacgacccacaacaccattgctggattcgcttcaacgagtctagtcagcgttgggaagggctggatgccgctaccggtgcccctgtaacggtagactatcccgccgattatcagccctggcaacaggcgtttgatgatagtgaagcgccgttttaccgctggtttagtggtgggttgacaaatgcctgctttaatgaagtagaccggcatgtcatgatgggctatggcgacgaggtggcctactactttgaaggtgaccgctgggataactcgctcaacaatggtcgtggtggtccggttgtccaggagacaatcacgcggcggcgcctgttggtggaggtggtgaaggctgcgcaggtgttgcgtgatctgggcctgaagaagggtgatcggattgctctgaatatgccgaatattatgccgcagatttattatacggaagcggcaaaacgactgggtattctgtacacgccggtcttcggtggcttctcggacaagactctttccgaccgtattcacaatgccggtgcacgagtggtgattacctctgatggtgcgtaccgcaacgcgcaggtggtgccctacaaagaagcgtataccgatcaggcgctcgataagtatattccggttgagacggcgcaggcgattgttgcgcagaccctggccaccttgcccctgactgagtcgcagcgccagacgatcatcaccgaagtggaggccgcactggccggtgagattacggttgagcgctcggacgtgatgcgtggggttggttctgccctcgcaaagctccgcgatcttgatgcaagcgtgcaggcaaaggtgcgtacagtactggcgcaggcgctggtcgagtcgccgccgcgggttgaagctgtggtggttgtgcgtcataccggtcaggagattttgtggaacgaggggcgagatcgctggagtcacgacttgctggatgctgcgctggcgaagattctggccaatgcgcgtgctgccggctttgatgtgcacagtgagaatgatctgctcaatctccccgatgaccagcttatccgtgcgctctacgccagtattccctgtgaaccggttgatgctgaatatccgatgtttatcatttacacatcgggtagcaccggtaagcccaagggtgtgatccacgttcacggcggttatgtcgccggtgtggtgcacaccttgcgggtcagttttgacgccgagccgggtgatacgatatatgtgatcgccgatccgggctggatcaccggtcagagctatatgctcacagccacaatggccggtcggctgaccggggtgattgccgagggatcaccgctcttcccctcagccgggcgttatgccagcatcatcgagcgctatggggtgcagatctttaaggcgggtgtgaccttcctcaagacagtgatgtccaatccgcagaatgttgaagatgtgcgactctatgatatgcactcgctgcgggttgcaaccttctgcgccgagccggtcagtccggcggtgcagcagtttggtatgcagatcatgaccccgcagtatatcaattcgtactgggcgaccgagcacggtggaattgtctggacgcatttctacggtaatcaggacttcccgcttcgtcccgatgcccatacctatcccttgccctgggtgatgggtgatgtctgggtggccgaaactgatgagagcgggacgacgcgctatcgggtcgctgatttcgatgagaagggcgagattgtgattaccgccccgtatccctacctgacccgcacactctggggtgatgtgcccggtttcgaggcgtacctgcgcggtgagattccgctgcgggcctggaagggtgatgccgagcgtttcgtcaagacctactggcgacgtgggccaaacggtgaatggggctatatccagggtgattttgccatcaagtaccccgatggtagcttcacgctccacggacgctctgacgatgtgatcaatgtgtcgggccaccgtatgggcaccgaggagattgagggtgccattttgcgtgaccgccagatcacgcccgactcgcccgtcggtaattgtattgtggtcggtgcgccgcaccgtgagaagggtctgaccccggttgccttcattcaacctgcgcctggccgtcatctgaccggcgccgaccggcgccgtctcgatgagctggtgcgtaccgagaagggggcggtcagtgtcccagaggattacatcgaggtcagtgcctttcccgaaacccgcagcgggaagtatatgcggcgctttttgcgcaatatgatgctcgatgaaccactgggtgatacgacgacgttgcgcaatcctgaagtgctcgaagagattgcagccaagatcgctgagtggaaacgccgtcagcgtatggccgaagagcagcagatcatcgaacgctatcgctacttccggatcgagtatcacccaccaacggccagtgcgggtaaactcgcggtagtgacggtgacaaatccgccggtgaacgcactgaatgagcgtgcgctcgatgagttgaacacaattgttgaccacctggcccgtcgtcaggatgttgccgcaattgtcttcaccggacagggcgccaggagttttgtcgccggcgctgatattcgccagttgctcgaagagattcatacggttgaagaggcaatggccctgccgaataacgcccatcttgctttccgcaagattgagcgtatgaataagccgtgtatcgcggcgatcaacggtgtggcgctcggtggtggtctggaattcgccatggcctgccattaccgggttgccgatgtctatgccgaattcggtcagccagagattaatctgcgcttgctacctggttatggtggcacgcagcgcttgccgcgcctgttgtacaagcgcaacaacggcaccggtctgctccgagcgctggagatgattctgggtgggcgtagcgtaccggctgatgaggcgctggagctgggtctgatcgatgccattgctaccggcgatcaggactcactgtcgctggcatgcgcgttagcccgtgccgcaatcggcgccgatggtcagttgatcgagtcggctgcggtgacccaggctttccgccatcgccacgagcagcttgacgagtggcgcaaaccagacccgcgctttgccgatgacgaactgcgctcgattatcgcccatccacgtatcgagcggattatccggcaggcccataccgttgggcgcgatgcggcagtgcatcgggcactggatgcaatccgctatggcattatccacggcttcgaggccggtctggagcacgaggcgaagctctttgccgaggcagtggttgacccgaacggtggcaagcgtggtattcgcgagttcctcgaccgccagagtgcgccgttgccaacccgccgaccattgattacacctgaacaggagcaactcttgcgcgatcagaaagaactgttgccggttggttcacccttcttccccggtgttgaccggattccgaagtggcagtacgcgcagacggttattcgtgatccggacaccggtgcggcggctcacggcgatcccatcgtggctgaaaagcagattattgtgccggtggaacgcccccgcgccaatcaggcgctgatctatgttctggcctcggaggtgaacttcaacgatatctgggcgattaccggtattccggtgtcacggtttgatgagcacgaccgcgactggcacgttaccggttcaggtggcatcggcctgatcgttgcgctgggtgaagaggcgcgacgcgaaggccggctgaaggtgggtgatctggtggcgatctactccgggcagtcggatctgctctcaccgctgatgggccttgatccgatggccgccgatttcgtcatccaggggaacgacacgccagatggatcgcatcagcaatttatgctggcccaggccccgcagtgtctgcccatcccaaccgatatgtctatcgaggcagccggcagctacatcctcaatctcggtacgatctatcgcgccctctttacgacgttgcaaatcaaggccggacgcaccatctttatcgagggtgcggcgaccggtaccggtctggacgcagcgcgctcggcggcccggaatggtctgcgcgtaattggaatggtcagttcgtcgtcacgtgcgtctacgctgctggctgcgggtgcccacggtgcgattaaccgtaaagacccggaggttgccgattgtttcacgcgcgtgcccgaagatccatcagcctgggcagcctgggaagccgccggtcagccgttgctggcgatgttccgggcgcagaacgacgggcgactggccgattatgtggtctcgcacgcgggcgagacggccttcccgcgcagtttccagcttctcggcgagccacgcgatggtcacattccgacgctcacattctacggtgccaccagtggctaccacttcaccttcctgggtaagccagggtcagcttcgccgaccgagatgctgcggcgggccaatctccgcgccggtgaggcggtgttgatctactacggggttgggagcgatgacctggtagataccggcggtctggaggctatcgaggcggcgcggcaaatgggagcgcggatcgtcgtcgttaccgtcagcgatgcgcaacgcgagtttgtcctctcgttgggcttcggggctgccctacgtggtgtcgtcagcctggcggaactcaaacggcgcttcggcgatgagtttgagtggccgcgcacgatgccgccgttgccgaacgcccgccaggacccgcagggtctgaaagaggctgtccgccgcttcaacgatctggtcttcaagccgctaggaagcgcggtcggtgtcttcttgcggagtgccgacaatccgcgtggctaccccgatctgatcatcgagcgggctgcccacgatgcactggcggtgagcgcgatgctgatcaagcccttcaccggacggattgtctacttcgaggacattggtgggcggcgttactccttcttcgcaccgcaaatctgggtgcgccagcgccgcatctacatgccgacggcacagatctttggtacgcacctctcaaatgcgtatgaaattctgcgtctgaatgatgagatcagcgccggtctgctgacgattaccgagccggcagtggtgccgtgggatgaactacccgaagcacatcaggcgatgtgggaaaatcgccacacggcggccacttatgtggtgaatcatgccttaccacgtctcggcctaaagaacagggacgagctgtacgaggcgtggacggccggcgagcggtagaactagaggaggactactatgctcctatttccaagaagaactaatatagcctttttcaaaacaacaggcatttttgctaattttcctttgctaggtagaaccattacaacttcaccatctttccttacacataaactgtcaaaggaagtaaccagggcatcaacttcgcctccaagaccaaagagaattgttgtcgcaattactggtgcgactggtgttgcactgggaatcagacttctacaagtgctaaaagagttgagcgtagaaacccatttggtgatttcaaaatggggtgcagcaacaatgaaatatgaaacagattgggaaccgcatgacgtggcggccttggcaaccaagacatactctgttcgtgatgtttctgcatgcatttcgtccggatctttccagcatgatggtatgattgttgtgccctgttccatgaaatcactagctgctattagaatcggttttacagaggatttaattacaagagctgccgatgtttcgattaaagagaatcgtaagttactactggttactcgggaaacccctttatcttccatccatcttgaaaacatgttgtctttatgcagggcaggtgttataatttttcctccggtacctgcgttttatacaagacccaagagccttcatgacctattagaacaaagtgttggcaggatcctagactgctttggcatccacgctgacacttttcctcgttgggaaggaataaaaagcaagtaacttacaggaggatcacaagatgacgcgtgaagtggtagtggtaagcggtgtccgtaccgcgatcgggacctttggcggcagcctgaaggatgtggcaccggcggagctgggcgcactggtggtgcgcgaggcgctggcgcgcgcgcaggtgtcgggcgacgatgtcggccacgtggtattcggcaacgtgatccagaccgagccgcgcgacatgtatctgggccgcgtcgcggccgtcaacggcggggtgacgatcaacgcccccgcgctgaccgtgaaccgcctgtgcggctcgggcctgcaggccattgtcagcgccgcgcagaccatcctgctgggcgataccgacgtcgccatcggcggcggcgcggaaagcatgagccgcgcaccgtacctggcgccggcagcgcgctggggcgcacgcatgggcgacgccggcctggtcgacatgatgctgggtgcgctgcacgatcccttccatcgcatccacatgggcgtgaccgccgagaatgtcgccaaggaatacgacatctcgcgcgcgcagcaggacgaggccgcgctggaatcgcaccgccgcgcttcggcagcgatcaaggccggctacttcaaggaccagatcgtcccggtggtgagcaagggccgcaagggcgacgtgaccttcgacaccgacgagcacgtgcgccatgacgccaccatcgacgacatgaccaagctcaggccggtcttcgtcaaggaaaacggcacggtcacggccggcaatgcctcgggcctgaacgacgccgccgccgcggtggtgatgatggagcgcgccgaagccgagcgccgcggcctgaagccgctggcccgcctggtgtcgtacggccatgccggcgtggacccgaaggccatgggcatcggcccggtgccggcgacgaagatcgcgctggagcgcgccggcctgcaggtgtcggacctggacgtgatcgaagccaacgaagcctttgccgcacaggcgtgcgccgtgaccaaggcgctcggtctggacccggccaaggttaacccgaacggctcgggcatctcgctgggccacccgatcggcgccaccggtgccctgatcacggtgaaggcgctgcatgagctgaaccgcgtgcagggccgctacgcgctggtgacgatgtgcatcggcggcgggcagggcattgccgccatcttcgagcgtatctgactatcataaaaataagaagcctgcatttgcaggcttcttatttttat

SEQ ID NO: 35 - DNA, 23564 bp, artificial sequence
  plasmid SG523
aaggccagcaaaaggccaggaaccgtaaaaaggccgcgttgctggcgtttttccataggctccgcccccctgacgagcatcacaaaaatcgacgctcaagtcagaggtggcgaaacccgacaggactataaagataccaggcgtttccccctggaagctccctcgtgcgctctcctgttccgaccctgccgcttaccggatacctgtccgcctttctcccttcgggaagcgtggcgctttctcatagctcacgctgtaggtatctcagttcggtgtaggtcgttcgctccaagctgggctgtgtgcacgaaccccccgttcagcccgaccgctgcgccttatccggtaactatcgtcttgagtccaacccggtaagacacgacttatcgccactggcagcagccactggtaacaggattagcagagcgaggtatgtaggcggtgctacagagttcttgaagtggtggcctaactacggctacactagaagaacagtatttggtatctgcgctctgctgaagccagttaccttcggaaaaagagttggtagctcttgatccggcaaacaaaccaccgctggtagcggtggtttttttgtttgcaagcagcagattacgcgcagaaaaaaaggatctcaagaagatcctttgatcttttctacggggtctgacgctcagtggaacgaaaactcacgttaagggattttggtcatgagattatcaaaaaggatcttcacctagatccttttaaattaaaaatgaagttttaaatcaatctaaagtatatatgagtaaacttggtctgacagctcttcctttttcaatattattgaagcatttatcagggttattgtctcatgagcggatacatatttgaatgtatttagaaaaataaacaaataggggttccgcgcacatttccccgaaaagtgccacctgacggtcctgcatcagctcttatatattaagctaccaacttagtatataagccaaaacttaaatgtgctaccaacacatcaagccgttagagaactctatctatagcaatatttcaaatgtaccgacatacaagagaaacattaactatatatattcaatttatgagattatcttaacagatataaatgtaaattgcaataagtaagatttagaagtttatagcctttgtgtattggaagcagtacgcaaaggcttttttatttgataaaaattagaagtatatttattttttcataattaatttatgaaaatgaaagggggtgagcaaagtgacagaggaaagcagtatcttatcaaataacaaggtattagcaatatcattattgactttagcagtaaacattatgacttttatagtgcttgtagctaagtagtacgaaagggggagctttaaaaagctccttggaatacatagaattcataaattaatttatgaaaagaagggcgtatatgaaaacttgtaaaaattgcaaagagtttattaaagatactgaaatatgcaaaatacattcgttgatgattcatgataaaacagtagcaacctattgcagtaaatacaatgagtcaagatgtttacataaagggaaagtccaatgtattaattgttcaaagatgaaccgatatggatggtgtgccataaaaatgagatgttttacagaggaagaacagaaaaaagaacgtacatgcattaaatattatgcaaggagctttaaaaaagctcatgtaaagaagagtaaaaagaaaaaataatttatttattaatttaatattgagagtgccgacacagtatgcactaaaaaatatatctgtggtgtagtgagccgatacaaaaggatagtcactcgcattttcataatacatcttatgttatgattatgtgtcggtgggacttcacgacgaaaacccacaataaaaaaagagttcggggtagggttaagcatagttgaggcaactaaacaatcaagctaggatatgcagtagcagaccgtaaggtcgttgtttaggtgtgttgtaatacatacgctattaagatgtaaaaatacggataccaatgaagggaaaagtataatttttggatgtagtttgtttgttcatctatgggcaaactacgtccaaagccgtttccaaatctgctaaaaagtatatcctttctaaaatcaaagtcaagtatgaaatcataaataaagtttaattttgaagttattatgatattatgtttttctattaaaataaattaagtatatagaatagtttaataatagtatatacttaatgtgataagtgtctgacagtgtcacagaaaggatgattgttatggattataagcggccggccagtgggcaagttgaaaaattcacaaaaatgtggtataatatctttgttcattagagcgataaacttgaatttgagagggaacttagatggtatttgaaaaaattgataaaaatagttggaacagaaaagagtattttgaccactactttgcaagtgtaccttgtacctacagcatgaccgttaaagtggatatcacacaaataaaggaaaagggaatgaaactatatcctgcaatgctttattatattgcaatgattgtaaaccgccattcagagtttaggacggcaatcaatcaagatggtgaattggggatatatgatgagatgataccaagctatacaatatttcacaatgatactgaaacattttccagcctttggactgagtgtaagtctgactttaaatcatttttagcagattatgaaagtgatacgcaacggtatggaaacaatcatagaatggaaggaaagccaaatgctccggaaaacatttttaatgtatctatgataccgtggtcaaccttcgatggctttaatctgaatttgcagaaaggatatgattatttgattcctatttttactatggggaaatattataaagaagataacaaaattatacttcctttggcaattcaagttcatcacgcagtatgtgacggatttcacatttgccgttttgtaaacgaattgcaggaattgataaatagttaacttcaggtttgtctgtaactaaaaacaagtatttaagcaaaaacatcgtagaaatacggtgttttttgttaccctaagtttgttaagggatgcataaactgcatcccttaacttgtttttcgtgtacctattttttgtgaatcgattatgtcttttgcgcattcgtcgacaattgcatatattgataaaaataataatagtgggtataattaagttgttaggaggttagttagagtgaaaccagtaacgttatacgatgtcgcagagtatgccggtgtctcttatcagaccgtttcccgcgtggtgaaccaggccagccacgtttctgcgaaaacgcgggaaaaagtggaagcggcgatggcggagctgaattacattcccaaccgcgtggcacaacaactggcgggcaaacagtcgttgctgattggcgttgccacctccagtctggccctgcacgcgccgtcgcaaattgtcgcggcgattaaatctcgcgccgatcaactgggtgccagcgtggtggtgtcgatggtagaacgaagcggcgtcgaagcctgtaaagcggcggtgcacaatcttctcgcgcaacgcgtcagtgggctgatcattaactatccgctggatgaccaggatgccattgctgtggaagctgcctgcactaatgttccggcgttatttcttgatgtctctgaccagacacccatcaacagtattattttctcccatgaagacggtacgcgactgggcgtggagcatctggtcgcattgggtcaccagcaaatcgcgctgttagcgggcccattaagttctgtctcggcgcgtctgcgtctggctggctggcataaatatctcactcgcaatcaaattcagccgatagcggaacgggaaggcgactggagtgccatgtccggttttcaacaaaccatgcaaatgctgaatgagggcatcgttcccactgcgatgctggttgccaacgatcagatggcgctgggcgcaatgcgcgccattaccgagtccgggctgcgcgttggtgcggacatctcggtagtgggatacgacgataccgaagacagctcatgttatatcccgccgttaaccaccatcaaacaggattttcgcctgctggggcaaaccagcgtggaccgcttgctgcaactctctcagggccaggcggtgaagggcaatcagctgttgcccgtctcactggtgaaaagaaaaaccaccctggcgcccaatacgcaaaccgcctctccccgcgcgttggccgattcattaatgcagctggcacgacaggtttcccgactggaaagcgggcagtgagcgcaacgcaattaatgtaagttagctcactcattaggcaccgggatctcgaccgatgcccttgagagccttcaacccagtcagctccttccggtgggcgcggggcatgactagcatgatcgtgctcctgtcgttgaggacccggctaggctggcggggttgccttactggttagcagaatgaatcaccgatacgcggctcagctagcacccggaattgtgagcggataacaattccttggaattgtgagcggataacaattataattaagttgttaggaggttagaatgagtctgaatttccttgattttgaacagccgattgcagagctggaagcgaaaatcgattctctgactgcggttagccgtcaggatgagaaactggatattaacatcgatgaagaagtgcatcgtctgcgtgaaaaaagcgtagaactgacacgtaaaatcttcgccgatctcggtgcatggcagattgcgcaactggcacgccatccacagcgtccttataccctggattacgttcgcctggcatttgatgaatttgacgaactggctggcgaccgcgcgtatgcagacgataaagctatcgtcggtggtatcgcccgtctcgatggtcgtccggtgatgatcattggtcatcaaaaaggtcgtgaaaccaaagaaaaaattcgccgtaactttggtatgccagcgccagaaggttaccgcaaagcactgcgtctgatgcaaatggctgaacgctttaagatgccaatcatcacctttatcgacaccccgggggcttatccgggcgtgggcgcagaagagcgcggtcagtctgaagccattgcacgcaacctgcgtgaaatgtctcgccttagcgtaccgactatttgtaccgttatcggtgaaggtggttctggcggcgcgctggcgattggcgtgggcgataaagtgaatatgctgcaatacagcacctattccgttatctcgccggaaggttgtgcgtccattctgtggaagagcgctgataaagcgccgctggcggctgaagcgatgggtatcatcgctccgcgtctgaaagaactaaaactgatcgactccatcatcccagaaccgctgggtggtgctcaccgtaacccggaagcgatggcggcatcgttgaaagcgcaactgttggcggatctggccgatctcgacgtgttaagcactgaagatttaaaaaatcgtcgttatcagcgcctgatgagctacggttacgcgtaataaggaggaacccactcatggatattcgtaagattaaaaaactgatcgagctggttgaagaatcaggcatctccgaactggaaatttctgaaggcgaagagtcagtacgcattagccgtgcagctcctgccgcaagtttccctgtgatgcaacaagcttacgctgcaccaatgatgcagcagccagctcaatctaacgcagccgctccggcgaccgttccttccatggaagcgccagcagcagcggaaatcagtggtcacatcgtacgttccccgatggttggtactttctaccgcaccccaagcccggacgcaaaagcgttcatcgaagtgggtcagaaagtcaacgtgggcgataccctgtgcatcgttgaagccatgaaaatgatgaaccagatcgaagcggacaaatccggtaccgtgaaagcaattctggtcgaaagtggacaaccggtagaatttgacgagccgctggtcgtcatcgagtaacgaggcgaacatgctggataaaattgttattgccaaccgcggcgagattgcattgcgtattcttcgtgcctgtaaagaactgggcatcaagactgtcgctgtgcactccagcgcggatcgcgatctaaaacacgtattactggcagatgaaacggtctgtattggccctgctccgtcagtaaaaagttatctgaacatcccggcaatcatcagcgccgctgaaatcaccggcgcagtagcaatccatccgggttacggcttcctctccgagaacgccaactttgccgagcaggttgaacgctccggctttatcttcattggcccgaaagcagaaaccattcgcctgatgggcgacaaagtatccgcaatcgcggcgatgaaaaaagcgggcgtcccttgcgtaccgggttctgacggcccgctgggcgacgatatggataaaaaccgtgccattgctaaacgcattggttatccggtgattatcaaagcctccggcggcggcggcggtcgcggtatgcgcgtagtgcgcggcgacgctgaactggcacaatccatctccatgacccgtgcggaagcgaaagctgctttcagcaacgatatggtttacatggagaaatacctggaaaatcctcgccacgtcgagattcaggtactggctgacggtcagggcaacgctatctatctggcggaacgtgactgctccatgcaacgccgccaccagaaagtggtcgaagaagcgccagcaccgggcattaccccggaactgcgtcgctacatcggcgaacgttgcgctaaagcgtgtgttgatatcggctatcgcggtgcaggtactttcgagttcctgttcgaaaacggcgagttctatttcatcgaaatgaacacccgtattcaggtagaacacccggttacagaaatgatcaccggcgttgacctgatcaaagaacagctgcgtatcgctgccggtcaaccgctgtcgatcaagcaagaagaagttcacgttcgcggccatgcggtggaatgtcgtatcaacgccgaagatccgaacaccttcctgccaagtccgggcaaaatcacccgtttccacgcacctggcggttttggcgtacgttgggagtctcatatctacgcgggctacaccgtaccgccgtactatgactcaatgatcggtaagctgatttgctacggtgaaaaccgtgacgtggcgattgcccgcatgaagaatgcgctgcaggagctgatcatcgacggtatcaaaaccaacgttgatctgcagatccgcatcatgaatgacgagaacttccagcatggtggcactaacatccactatctggagaaaaaactcggtcttcaggaaaaataatataggaggatataacatgagctggattgaacgaattaaaagcaacattactcccacccgcaaggcgagcattcctgaaggggtgtggactaagtgtgatagctgcggtcaggttttataccgcgctgagctggaacgtaatcttgaggtctgtccgaagtgtgaccatcacatgcgtatgacagcgcgtaatcgcctgcatagcctgttagatgaaggaagccttgtggagctgggtagcgagcttgagccgaaagatgtgctgaagtttcgtgactccaagaagtataaagaccgtctggcatctgcgcagaaagaaaccggcgaaaaagatgcgctggtggtgatgaaaggcactctgtatggaatgccggttgtcgctgcggcattcgagttcgcctttatgggcggttcaatggggtctgttgtgggtgcacgtttcgtgcgtgccgttgagcaggcgctggaagataactgcccgctgatctgcttctccgcctctggtggcgcacgtatgcaggaagcactgatgtcgctgatgcagatggcgaaaacctctgcggcactggcaaaaatgcaggagcgcggcttgccgtacatctccgtgctgaccgacccgacgatgggcggtgtttctgcaagtttcgccatgctgggcgatctcaacatcgctgaaccgaaagcgttaatcggctttgccggtccgcgtgttatcgaacagaccgttcgcgaaaaactgccgcctggattccagcgcagtgaattcctgatcgagaaaggcgcgatcgacatgatcgtccgtcgtccggaaatgcgcctgaaactggcgagtattctggcgaagttgatgaatctgccagcgccgaatcctgaagcgccgcgtgaaggcgtagtggtacccccggtaccggatcaggaacctgaggcctgagactaggaggatcttaaatgaccgacgtccgattccgcattatcggtacgggtgcctacgtaccggaacggatcgtctccaacgatgaagtcggcgcgccggccggggtggacgacgactggatcacccgcaagaccggtatccggcagcgtcgctgggccgccgacgaccaggccacctcggacctggccacggccgcggggcgggcagcgctgaaagcggcgggcatcacgcccgagcagctgaccgtgatcgcggtcgccacctccacgccggaccggccgcagccgcccacggcggcctatgtccagcaccacctcggtgcgaccggcactgcggcgttcgacgtcaacgcggtctgctccggcaccgtgttcgcgctgtcctcggtggcgggcaccctcgtgtaccggggcggttacgcgctggtcatcggcgcggacctgtactcgcgcatcctcaacccggccgaccgcaagacggtcgtgctgttcggggacggcgccggcgcaatggtcctcgggccgacctcgaccggcacgggccccatcgtccggcgcgtcgccctgcacaccttcggcggcctcaccgacctgatccgtgtgcccgcgggcggcagccgccagccgctggacacggatggcctcgacgcgggactgcagtacttcgcgatggacgggcgtgaggtgcgccgcttcgtcacggagcacctgccgcagctgatcaagggcttcctgcacgaggccggggtcgacgccgccgacatcagccacttcgtgccgcatcaggccaacggtgtcatgctcgacgaggtcttcggcgagctgcatctgccgcgggcgaccatgcaccggacggtcgagacctacggcaacacgggagcggcctccatcccgatcaccatggacgcggccgtgcgcgccggttccttccggccgggcgagctggtcctgctggccgggttcggcggcggcatggccgcgagcttcgccctgatcgagtggtagtagggaggtctgtttaatgaaaaaggtatgtgttataggtgcaggtactatgggttcaggaattgctcaggcatttgcagctaaaggatttgaagtagtattaagagatattaaagatgaatttgttgatagaggattagattttatcaataaaaatctttctaaattagttaaaaaaggaaagatagaagaagctactaaagttgaaatcttaactagaatttccggaacagttgaccttaatatggcagctgattgcgatttagttatagaagcagctgttgaaagaatggatattaaaaagcagatttttgctgacttagacaatatatgcaagccagaaacaattcttgcatcaaatacatcatcactttcaataacagaagtggcatcagcaactaaaagacctgataaggttataggtatgcatttctttaatccagctcctgttatgaagcttgtagaggtaataagaggaatagctacatcacaagaaacttttgatgcagttaaagagacatctatagcaataggaaaagatcctgtagaagtagcagaagcaccaggatttgttgtaaatagaatattaataccaatgattaatgaagcagttggtatattagcagaaggaatagcttcagtagaagacatagataaagctatgaaacttggagctaatcacccaatgggaccattagaattaggtgattttataggtcttgatatatgtcttgctataatggatgttttatactcagaaactggagattctaagtatagaccacatacattacttaagaagtatgtaagagcaggatggcttggaagaaaatcaggaaaaggtttctacgattattcaaaataagtttacaagaatccctttaggaggattagtcatggaactaaacaatgtcatccttgaaaaggaaggtaaagttgctgtagttaccattaacagacctaaagcattaaatgcgttaaatagtgatacactaaaagaaatggattatgttataggtgaaattgaaaatgatagcgaagtacttgcagtaattttaactggagcaggagaaaaatcatttgtagcaggagcagatatttctgagatgaaggaaatgaataccattgaaggtagaaaattcgggatacttggaaataaagtgtttagaagattagaacttcttgaaaagcctgtaatagcagctgttaatggttttgctttaggaggcggatgcgaaatagctatgtcttgtgatataagaatagcttcaagcaacgcaagatttggtcaaccagaagtaggtctcggaataacacctggttttggtggtacacaaagactttcaagattagttggaatgggcatggcaaagcagcttatatttactgcacaaaatataaaggcagatgaagcattaagaatcggacttgtaaataaggtagtagaacctagtgaattaatgaatacagcaaaagaaattgcaaacaaaattgtgagcaatgctccagtagctgttaagttaagcaaacaggctattaatagaggaatgcagtgtgatattgatactgctttagcatttgaatcagaagcatttggagaatgcttttcaacagaggatcaaaaggatgcaatgacagctttcatagagaaaagaaaaattgaaggcttcaaaaatagataggctcagctagcacccggaattgtgagcggataacaattccttggaattgtgagcggataacaattataattaagttgttaggaggttagaatgactcagcgcattgcgtatgtgaccggcggcatgggtggtatcggaaccgccatttgccagcggctggccaaggatggctttcgtgtggtggccggttgcggccccaactcgccgcgccgcgaaaagtggctggagcagcagaaggccctgggcttcgatttcattgcctcggaaggcaatgtggctgactgggactcgaccaagaccgcattcgacaaggtcaagtccgaggtcggcgaggttgatgtgctgatcaacaacgccggtatcacccgcgacgtggtgttccgcaagatgacccgcgccgactgggatgcggtgatcgacaccaacctgacctcgctgttcaacgtcaccaagcaggtgatcgacggcatggccgaccgtggctggggccgcatcgtcaacatctcgtcggtgaacgggcagaagggccagttcggccagaccaactactccaccgccaaggccggcctgcatggcttcaccatggcactggcgcaggaagtggcgaccaagggcgtgaccgtcaacacggtctctccgggctatatcgccaccgacatggtcaaggcgatccgccaggacgtgctcgacaagatcgtcgcgacgatcccggtcaagcgcctgggcctgccggaagagatcgcctcgatctgcgcctggttgtcgtcggaggagtccggtttctcgaccggcgccgacttctcgctcaacggcggcctgcatatgggctgaacaggaggcaataaatgagcgcacaatccctggaagtaggccagaaggcccgtctcagcaagcggttcggggcggcggaggtagccgccttcgccgcgctctcggaggacttcaaccccctgcacctggacccggccttcgccgccaccacggcgttcgagcggcccatagtccacggcatgctgctcgccagcctcttctccgggctgctgggccagcagttgccgggcaaggggagcatctatctgggtcaaagcctcagcttcaagctgccggtctttgtcggggacgaggtgacggccgaggtggaggtgaccgcccttcgcgaggacaagcccatcgccaccctgaccacccgcatcttcacccaaggcggcgccctcgccgtgacgggggaagccgtggtcaagctgccttaagttgaggaggtagataatgtctacaacacataacgtccctcagggcgatcttgttttacgtactttagccatgcccgccgataccaatgccaatggtgacatctttggtggttggttaatgtcacaaatggatattggcggcgctattctggcaaaagaaattgcccacggtcgcgtagtgactgtgcgggttgaaggaatgactttcttacggccggttgcggtcggcgatgtggtgtgctgctatgcacgctgtgtccagaaagggacgacatcggtcagcattaatattgaagtgtgggtgaaaaaagtagcgtctgaaccaatcgggcaacggtataaagcgacagaagcattatttaagtatgtcgcggttgatcctgaaggaaaacctcgcgccttacctgttgagtaaaaaggagtgtatataaatggagaattgtgaaatttgtactttggaaactgcttggtgtcaagggtgcgggaattttaatatactttcttctttaaaagaatcccttacggagcttaagttaaatccccatcaagttttaattgtaggaggaatagggcaagcagctaaaacgccacaatatataaatactaatggtttctgtggactccatggaagggcacttcctcctgctgttggtgctaaaatagcaaataaggatttaacagtaataattgatacaggagatggagatgcctatggcgagggaggaaaccattttattcataatataagaaggaatgttgatataacggagtttgttcatgataatcaaatttatggtcttactaaaggtcaagcttctccaacaacggatattgggcatgttacagaagttcaaccttatggttctaacaatgtacctttaaatcctgtacttttagctattacacttggggctggttttgttgcaagagcatttagcggtgataaaaatcatcttaaggagataatgaaacaggccataaactataaaggatattctttagtggatatacttcagccttgcgtaagttttaataagattaatacctttaaatggtatatggatagagtttataaattagataataactatgatccttcaaataaaataaaagcaatggagaaggcaatggaatggggagataaaattcctataggtattctatacaaggacgagaataaaaaagagttcagcgagaatttagaatttttaaagaaagaaaaaccactagtttatagtgaaataaaaattgataaaataaaaaattttcttgaggaattcagataaatcatcagggaggatcacatgatttataatattttgattggaggagctgcaggacagggaatggaaactttagcagctatacttcaaaaaattttaaagaaaaaaggttttgagatatttacaacacaggattacatgtcacgagtaagaggaggacataatttttttcaaattagatttggaaatgaagaaatacgtacccatgtaaaggaaattgatggaataatagcacttgatctaagtaccattgaacttcatataaatgagttaaagaaagatggatttgtaatttgtgataattctattaaatatgaagataaaagagtttatgctctacctttaagagatattgctcataaaataggtaatgttagggtatatggtagtgttgctttgggtgctttattgaaattatttaatcaggatttagcctttgcttttgatgttcttaatgttaggtttaaagaggatattgcgcaaaagaattttaatgcttttgaggaaggctttaaaaaagttgtacctaagtatgatataaagccaaaagaaaaagatgataagcttctaataaatgcaaatcaggcaattgctttaggcgcacttgcagcaggatgtaaattttattcagcttatcctatgacaccatcaactagtataatggactatttggcttccaaaatgaaggaagcaggtattgtagtggaacaggcagaggatgaaatagctgcaatcaatatggcaattggagcatcgtttactggaacaagagcaatgacaggtacttcaggaggaggttttgcactaatggttgaagctattggcctttcaagtatgcttgaggtacctcttgtggttgcagaaatacaaagaccaggaccaactacagggcttccaactagaacagagcagggagatcttaaatttgttatatcttcatcaccaggagatgttcctaagatggtaatagcattaaaaaatgcagaagatgctttctatcaaactatgagagcctttaatattgcagataaatatcaaatacctgtaataatactaggggatcaatatattgcagataacaatagaactgttagagaatttgattttgacaaaattaaagtaaataggtatttaagtgatgaagattttaaggaaaatagagagtataagagatatgaagtaacaaagacaggtgtttcacctagaataataccaggaaatattgaaggtaagacagttttagtggatagcgatgagcatgatgagtatggacatataacagaatcgtctgaaaccagagtattaatgaacgataagagaattagaaaaatgaaacacttaaaagaggaattaattgaaccagagtattttggtgaagacgcagcagaaaatattcttattggttggggatctttagaaggagcaataaaagaggcagttaatgatttaaataaagagggaaaagaaaaatatgcagctctcatatttggagatgtttggcctcttccagaaaagcttttaagagaaaaagcctcaaaagctaagacattaatagatgttgaacaaaatgctcaaggtcagctcgcagatattataagagaaggtactggaatagaagttgacaaaaagattttaaaatacgatggaaggcccattatggcttcatatatagtaggaagaataaaggagggtgagtaaatacataggaggaactacatggcaaaaaagttgaaaaccatggatggaaatgaagctgcagcttacgcttcttatgcctttacagatgtagctgcaatttatcctataacaccatccactccaatggcagagctagttgataactggtcatctcatggaagaaaaaacatcttcgggcagcctgttaaaatagttgaaatgcaatcagaggctggtgcagctggaactgttcacggttccttgattgcaggtgcacttacaactacatacactgcttctcaaggtcttcttttaatgataccaaacatgtataaaatggctggagaacttctaccctgcgtattccatgtaagtgctcgtgctattgcaactcacgctttatctatatttggagaccatcaggacgtcatggctgcaagacaaacaggttttgttctcttagcctcttcaaacgttcaagaggtcatggatttagctatggtatcacacttagctgctattaaagcaagagtgccattcatgcacttctttgacggttttagaacatcacatgaatatcaaaaaatagaaatgattgattacaatgatgtagctcctctagttgactacgaatcaattaaggcttttaggtctagagctcttaacccagaacatcctactgttcgtggtacagctcaaaatcctgatatctacttccagggcagagaagcttcaaacaatttctacactgcagttcctgatatcgtagaaagctatatgagagaaatagaaaagataactggaagagtatatcatccttttgattactatggcgaccctgaagcagaggatataattattgccatgggttcagtttgtgatacagttgaggaaactgtagattatttaaggagtaagggacaaaaagttggattgttgaaggttcatttatatagaccattctctactgactacttctttaaatatcttcctaaaactattaaaagaattgcagttctagacagaacaaaggaacctggttcagccggagaacctctttatctagatgtagttaatgccttttataaccatccaaataaacctgtcatagttggaggacgttttggtttaggttctaaagacacacgaccatcacaaattttatctgtatttgataacttaagagctcaaagccctaaaaatagatttaccattggaattgtggatgatgtttcaaatacatctctacctgaaggtgaaataatcgatactacacctcaaggaactataagatgtaaattctatggtttaggctctgatggtacagttggtgcaaacaaaagtgctataaaaatcataggtgataataccgatatgtactgtcaggcttacttctcctatgacagtaaaaagtctggaggaagtactgtttctcacttaagattcggaaataaacctattaaatccccttatcttgtttatgaagcagactacattgcctgccacaataaatcctttatatataatataaatgtgttaaaaggattaaagaagaacggaatttttgttctcaactgtccatttaaagataacgaacttgatgaacatcttcctaatgcaatgaaaaaatatattgcagacaacaacatacaattttacaccatagacgcagtttcaatagctcaagaggtaggtcttggttctagaataaacatgattatgcagtctgctttctttaaactagctaacataataccagtggataaggctgttcagtatttgaaagattctatagaatacacttacggtaaaaaaggtgctactatagttgatgcaaataaaaaagctgtagatgccggagttaacgcagctcacaaagttactgttcctgaagcctggaaaaatgctgaatccaactatcaacctttaaaaggtcttcccgatttcgttcaaagaattgaaagacctatggcaaggcatgaaggtgacgaactacctgtaagtgcttttaaaggcatggaagatggtgtatttcctcttggtataaccgcttatgaaaagcgtggaattgcagttaacgtcccagaatggcaaatagacaaatgtattcaatgtaaccagtgtgcatatgtttgtcctcacagtgtaataagagcttgtttacttgatgatgaggaaaaagaaaatgctcctgaaagattcgttaccaagaagcctgtaggtaaaggcctcgaacacctacactacaaaatccaaataagtccacttgactgtactggttgcggaaattgtgcggatatatgtcctgctccaggtaaagctttaattatgaagcctgctgcagaacaaatagaagaacaatcagaaaacttcgaatatgccttaaaggtaaaacctaaggaaggtataatggatattcatactgtaaagggaagtcaattttctagaccacttctagaatttaacggagcttgtcccggctgtggtgaaacaccttatattaaactattaacacagctttatggagatagaatgatgatagcaaacgctactggatgctcatctatttggggtgcaagtgcaccttcaattgcatacaccacaaataacttcggaaaaggtccttcttggggtaactcattatttgaggataatgcagagtacggttacggaatgtttttaggcgttaagcaaatgagagaaagattggctgaactaatggaagaagctattaattcaaatataaattctgatcttaaggatgcttttagcttgtggctagatggctttgatgacggcgataaatccaaggaagcatcaaataaaatccttagaatcatggaaaacgaggacttcaagggtgataaattattatctgaaatatatgataagaaagattatttagttaagaaatcccactggttaattggaggagacggttgggcatatgatataggcttcggcggagtagatcaagtgcttgctttaggtgatgatgtaaatatatttgtaatggatactgaaatatactctaatactggtggtcaatcctcaaaatccacaccaactggagcaattgcaaaattcgcttcagcaggtaaaaaaacacgaaaaaaagatcttggcttaatggctatgacttatggaaatgtctatgtaactcaaatagctatgggagcaaacatgacccacactattaaagcaattactgaagccgaagcctacaaaggtccttctttagtaatagcttatgcaccatgtataagccacggtattaaaactggtatgggcaccagcatagctcaagagaaaaaagctgttgaagcaggatactggcatttatacagatacaatcctcttctaaaagagcagggaaaaaatccatttatacttgattcaaaagagccaacagaatcctatacagactttataaatggagaacttcgttactcttcacttaagactatcttccctgataaggttgaagatgcatttaataagtcagcagaaaatgcaaaggaaagatactctctttataaaaaattatcagaattacagtaaactagcaggaggatctaatgtctaacgtgcaggagtggcaacagcttgccaacaaggaattgagccgtcgggagaaaactgtcgactcgctggttcatcaaaccgcggaagggatcgccatcaagccgctgtataccgaagccgatctcgataatctggaggtgacaggtacccttcctggtttgccgccctacgttcgtggcccgcgtgccactatgtataccgcccaaccgtggaccatccgtcagtatgctggtttttcaacagcaaaagagtccaacgctttttatcgccgtaacctggccgccgggcaaaaaggtctttccgttgcgtttgaccttgccacccaccgtggctacgactccgataacccgcgcgtggcgggcgacgtcggcaaagcgggcgtcgctatcgacaccgtggaagatatgaaagtcctgttcgaccagatcccgctggataaaatgtcggtttcgatgaccatgaatggcgcagtgctaccagtactggcgttttatatcgtcgccgcagaagagcaaggtgttacacctgataaactgaccggcaccattcaaaacgatattctcaaagagtacctctgccgcaacacctatatttacccaccaaaaccgtcaatgcgcattatcgccgacatcatcgcctggtgttccggcaacatgccgcgatttaataccatcagtatcagcggttaccacatgggtgaagcgggtgccaactgcgtgcagcaggtagcatttacgctcgctgatgggattgagtacatcaaagcagcaatctctgccggactgaaaattgatgacttcgctcctcgcctgtcgttcttcttcggcatcggcatggatctgtttatgaacgtcgccatgttgcgtgcggcacgttatttatggagcgaagcggtcagtggatttggcgcacaggacccgaaatcactggcgctgcgtacccactgccagacctcaggctggagcctgactgaacaggatccgtataacaacgttatccgcaccaccattgaagcgctggctgcgacgctgggcggtactcagtcactgcataccaacgcctttgacgaagcgcttggtttgcctaccgatttctcagcacgcattgcccgcaacacccagatcatcatccaggaagaatcagaactctgccgcaccgtcgatccactggccggatcctattacattgagtcgctgaccgatcaaatcgtcaaacaagccagagctattatccaacagatcgacgaagccggtggcatggcgaaagcgatcgaagcaggtctgccaaaacgaatgatcgaagaggcctcagcgcgcgaacagtcgctgatcgaccagggcaagcgtgtcatcgttggtgtcaacaagtacaaactggatcacgaagacgaaaccgatgtacttgagatcgacaacgtgatggtgcgtaacgagcaaattgcttcgctggaacgcattcgcgccacccgtgatgatgccgccgtaaccgccgcgttgaacgccctgactcacgccgcacagcataacgaaaacctgctggctgccgctgttaatgccgctcgcgttcgcgccaccctgggtgaaatttccgatgcgctggaagtcgctttcgaccgttatctggtgccaagccagtgtgttaccggcgtgattgcgcaaagctatcatcagtctgagaaatcggcctccgagttcgatgccattgttgcgcaaacggagcagttccttgccgacaatggtcgtcgcccgcgcattctgatcgctaagatgggccaggatggacacgatcgcggcgcgaaagtgatcgccagcgcctattccgatctcggtttcgacgtagatttaagcccgatgttctctacacctgaagagatcgcccgcctggccgtagaaaacgacgttcacgtagtgggcgcatcctcactggctgccggtcataaaacgctgatcccggaactggtcgaagcgctgaaaaaatggggacgcgaagatatctgcgtggtcgcgggtggcgtcattccgccgcaggattacgccttcctgcaagagcgcggcgtggcggcgatttatggtccaggtacacctatgctcgacagtgtgcgcgacgtactgaatctgataagccagcatcatgattaaacgataggaggactacatgtcttatcagtatgttaacgttgtcactatcaacaaagtggcggtcattgagtttaactatggccgaaaacttaatgccttaagtaaagtctttattgatgatcttatgcaggcgttaagcgatctcaaccggccggaaattcgctgtatcattttgcgcgcaccgagtggatccaaagtcttctccgcaggtcacgatattcacgaactgccgtctggcggtcgcgatccgctctcctatgatgatccattgcgtcaaatcacccgcatgatccaaaaattcccgaaaccgatcatttcgatggtggaaggtagtgtttggggtggcgcatttgaaatgatcatgagttccgatctgatcatcgccgccagtacctcaaccttctcaatgacgcctgtaaacctcggcgtcccgtataacctggtcggcattcacaacctgacccgcgacgcgggcttccacattgtcaaagagctgatttttaccgcttcgccaatcaccgcccagcgcgcgctggctgtcggcatcctcaaccatgttgtggaagtggaagaactggaagatttcaccttacaaatggcgcaccacatctctgagaaagcgccgttagccattgccgttatcaaagaagagctgcgtgtactgggcgaagcacacaccatgaactccgatgaatttgaacgtattcaggggatgcgccgcgcggtgtatgacagcgaagattaccaggaagggatgaacgctttcctcgaaaaacgtaaacctaatttcgttggtcattaacttacaggaggatcacaagatgacgcgtgaagtggtagtggtaagcggtgtccgtaccgcgatcgggacctttggcggcagcctgaaggatgtggcaccggcggagctgggcgcactggtggtgcgcgaggcgctggcgcgcgcgcaggtgtcgggcgacgatgtcggccacgtggtattcggcaacgtgatccagaccgagccgcgcgacatgtatctgggccgcgtcgcggccgtcaacggcggggtgacgatcaacgcccccgcgctgaccgtgaaccgcctgtgcggctcgggcctgcaggccattgtcagcgccgcgcagaccatcctgctgggcgataccgacgtcgccatcggcggcggcgcggaaagcatgagccgcgcaccgtacctggcgccggcagcgcgctggggcgcacgcatgggcgacgccggcctggtcgacatgatgctgggtgcgctgcacgatcccttccatcgcatccacatgggcgtgaccgccgagaatgtcgccaaggaatacgacatctcgcgcgcgcagcaggacgaggccgcgctggaatcgcaccgccgcgcttcggcagcgatcaaggccggctacttcaaggaccagatcgtcccggtggtgagcaagggccgcaagggcgacgtgaccttcgacaccgacgagcacgtgcgccatgacgccaccatcgacgacatgaccaagctcaggccggtcttcgtcaaggaaaacggcacggtcacggccggcaatgcctcgggcctgaacgacgccgccgccgcggtggtgatgatggagcgcgccgaagccgagcgccgcggcctgaagccgctggcccgcctggtgtcgtacggccatgccggcgtggacccgaaggccatgggcatcggcccggtgccggcgacgaagatcgcgctggagcgcgccggcctgcaggtgtcggacctggacgtgatcgaagccaacgaagcctttgccgcacaggcgtgcgccgtgaccaaggcgctcggtctggacccggccaaggttaacccgaacggctcgggcatctcgctgggccacccgatcggcgccaccggtgccctgatcacggtgaaggcgctgcatgagctgaaccgcgtgcagggccgctacgcgctggtgacgatgtgcatcggcggcgggcagggcattgccgccatcttcgagcgtatctgaaactacaggaggatcatatggaaaactttatcggaagccacatgatttatacgtatgaaaacggatgggaatacgagatttatattaaaaacgaccatacaattgattatagaattcatagcggaatggttgccggacgctgggttcgagatcaggaagtgaatattgtcaaactgacagaaggcgtatataaagtgtcttggacagagccgactggcacggatgtttcattaaactttatgccaaatgaaaaacgcatgcatggcattattttcttcccgaaatgggtgcatgaacatcctgaaattacggtttgctaccaaaatgaccacattgatttgatgaaagaatcccgcgaaaaatatgaaacgtatccaaaatacgttgtacctgaatttgcggaaattacatttctgaaaaatgaaggagtcgacaacgaagaagtgatttcgaaggctccttatgagggaatgacagacgatattcgcgcgggaagattataactatcataaaaataagaagcctgcatttgcaggcttcttatttttat

SEQ ID NO: 36 - DNA, 12779 bp, artificial sequence
  plasmid SG582
aaggccagcaaaaggccaggaaccgtaaaaaggccgcgttgctggcgtttttccataggctccgcccccctgacgagcatcacaaaaatcgacgctcaagtcagaggtggcgaaacccgacaggactataaagataccaggcgtttccccctggaagctccctcgtgcgctctcctgttccgaccctgccgcttaccggatacctgtccgcctttctcccttcgggaagcgtggcgctttctcatagctcacgctgtaggtatctcagttcggtgtaggtcgttcgctccaagctgggctgtgtgcacgaaccccccgttcagcccgaccgctgcgccttatccggtaactatcgtcttgagtccaacccggtaagacacgacttatcgccactggcagcagccactggtaacaggattagcagagcgaggtatgtaggcggtgctacagagttcttgaagtggtggcctaactacggctacactagaagaacagtatttggtatctgcgctctgctgaagccagttaccttcggaaaaagagttggtagctcttgatccggcaaacaaaccaccgctggtagcggtggtttttttgtttgcaagcagcagattacgcgcagaaaaaaaggatctcaagaagatcctttgatcttttctacggggtctgacgctcagtggaacgaaaactcacgttaagggattttggtcatgagattatcaaaaaggatcttcacctagatccttttaaattaaaaatgaagttttaaatcaatctaaagtatatatgagtaaacttggtctgacagctcttcctttttcaatattattgaagcatttatcagggttattgtctcatgagcggatacatatttgaatgtatttagaaaaataaacaaataggggttccgcgcacatttccccgaaaagtgccacctgacggtcctgcatcagctcttatatattaagctaccaacttagtatataagccaaaacttaaatgtgctaccaacacatcaagccgttagagaactctatctatagcaatatttcaaatgtaccgacatacaagagaaacattaactatatatattcaatttatgagattatcttaacagatataaatgtaaattgcaataagtaagatttagaagtttatagcctttgtgtattggaagcagtacgcaaaggcttttttatttgataaaaattagaagtatatttattttttcataattaatttatgaaaatgaaagggggtgagcaaagtgacagaggaaagcagtatcttatcaaataacaaggtattagcaatatcattattgactttagcagtaaacattatgacttttatagtgcttgtagctaagtagtacgaaagggggagctttaaaaagctccttggaatacatagaattcataaattaatttatgaaaagaagggcgtatatgaaaacttgtaaaaattgcaaagagtttattaaagatactgaaatatgcaaaatacattcgttgatgattcatgataaaacagtagcaacctattgcagtaaatacaatgagtcaagatgtttacataaagggaaagtccaatgtattaattgttcaaagatgaaccgatatggatggtgtgccataaaaatgagatgttttacagaggaagaacagaaaaaagaacgtacatgcattaaatattatgcaaggagctttaaaaaagctcatgtaaagaagagtaaaaagaaaaaataatttatttattaatttaatattgagagtgccgacacagtatgcactaaaaaatatatctgtggtgtagtgagccgatacaaaaggatagtcactcgcattttcataatacatcttatgttatgattatgtgtcggtgggacttcacgacgaaaacccacaataaaaaaagagttcggggtagggttaagcatagttgaggcaactaaacaatcaagctaggatatgcagtagcagaccgtaaggtcgttgtttaggtgtgttgtaatacatacgctattaagatgtaaaaatacggataccaatgaagggaaaagtataatttttggatgtagtttgtttgttcatctatgggcaaactacgtccaaagccgtttccaaatctgctaaaaagtatatcctttctaaaatcaaagtcaagtatgaaatcataaataaagtttaattttgaagttattatgatattatgtttttctattaaaataaattaagtatatagaatagtttaataatagtatatacttaatgtgataagtgtctgacagtgtcacagaaaggatgattgttatggattataagcggccggccagtgggcaagttgaaaaattcacaaaaatgtggtataatatctttgttcattagagcgataaacttgaatttgagagggaacttagatggtatttgaaaaaattgataaaaatagttggaacagaaaagagtattttgaccactactttgcaagtgtaccttgtacctacagcatgaccgttaaagtggatatcacacaaataaaggaaaagggaatgaaactatatcctgcaatgctttattatattgcaatgattgtaaaccgccattcagagtttaggacggcaatcaatcaagatggtgaattggggatatatgatgagatgataccaagctatacaatatttcacaatgatactgaaacattttccagcctttggactgagtgtaagtctgactttaaatcatttttagcagattatgaaagtgatacgcaacggtatggaaacaatcatagaatggaaggaaagccaaatgctccggaaaacatttttaatgtatctatgataccgtggtcaaccttcgatggctttaatctgaatttgcagaaaggatatgattatttgattcctatttttactatggggaaatattataaagaagataacaaaattatacttcctttggcaattcaagttcatcacgcagtatgtgacggatttcacatttgccgttttgtaaacgaattgcaggaattgataaatagttaacttcaggtttgtctgtaactaaaaacaagtatttaagcaaaaacatcgtagaaatacggtgttttttgttaccctaagtttgttaagggatgcataaactgcatcccttaacttgtttttcgtgtacctattttttgtgaatcgattatgtcttttgcgcattcgtcgacaattgcatatattgataaaaataataatagtgggtataattaagttgttaggaggttagttagagtgaaaccagtaacgttatacgatgtcgcagagtatgccggtgtctcttatcagaccgtttcccgcgtggtgaaccaggccagccacgtttctgcgaaaacgcgggaaaaagtggaagcggcgatggcggagctgaattacattcccaaccgcgtggcacaacaactggcgggcaaacagtcgttgctgattggcgttgccacctccagtctggccctgcacgcgccgtcgcaaattgtcgcggcgattaaatctcgcgccgatcaactgggtgccagcgtggtggtgtcgatggtagaacgaagcggcgtcgaagcctgtaaagcggcggtgcacaatcttctcgcgcaacgcgtcagtgggctgatcattaactatccgctggatgaccaggatgccattgctgtggaagctgcctgcactaatgttccggcgttatttcttgatgtctctgaccagacacccatcaacagtattattttctcccatgaagacggtacgcgactgggcgtggagcatctggtcgcattgggtcaccagcaaatcgcgctgttagcgggcccattaagttctgtctcggcgcgtctgcgtctggctggctggcataaatatctcactcgcaatcaaattcagccgatagcggaacgggaaggcgactggagtgccatgtccggttttcaacaaaccatgcaaatgctgaatgagggcatcgttcccactgcgatgctggttgccaacgatcagatggcgctgggcgcaatgcgcgccattaccgagtccgggctgcgcgttggtgcggacatctcggtagtgggatacgacgataccgaagacagctcatgttatatcccgccgttaaccaccatcaaacaggattttcgcctgctggggcaaaccagcgtggaccgcttgctgcaactctctcagggccaggcggtgaagggcaatcagctgttgcccgtctcactggtgaaaagaaaaaccaccctggcgcccaatacgcaaaccgcctctccccgcgcgttggccgattcattaatgcagctggcacgacaggtttcccgactggaaagcgggcagtgagcgcaacgcaattaatgtaagttagctcactcattaggcaccgggatctcgaccgatgcccttgagagccttcaacccagtcagctccttccggtgggcgcggggcatgactagcatgatcgtgctcctgtcgttgaggacccggctaggctggcggggttgccttactggttagcagaatgaatcaccgatacgcggctcagctagcacccggaattgtgagcggataacaattccttggaattgtgagcggataacaattataattaagttgttaggaggttagaatgaaaaattgtgtcatcgtcagtgcggtacgtactgctatcggtagttttaacggttcactcgcttccaccagcgccatcgacctgggggcgacagtaattaaagccgccattgaacgtgcaaaaatcgattcacaacacgttgatgaagtgattatgggtaacgtgttacaagccgggctggggcaaaatccggcgcgtcaggcactgttaaaaagcgggctggcagaaacggtgtgcggattcacggtcaataaagtatgtggttcgggtcttaaaagtgtggcgcttgccgcccaggccattcaggcaggtcaggcgcagagcattgtggcggggggtatggaaaatatgagtttagccccctacttactcgatgcaaaagcacgctctggttatcgtcttggagacggacaggtttatgacgtaatcctgcgcgatggcctgatgtgcgccacccatggttatcatatggggattaccgccgaaaacgtggctaaagagtacggaattacccgtgaaatgcaggatgaactggcgctacattcacagcgtaaagcggcagccgcaattgagtccggtgcttttacagccgaaatcgtcccggtaaatgttgtcactcgaaagaaaaccttcgtcttcagtcaagacgaattcccgaaagcgaattcaacggctgaagcgttaggtgcattgcgcccggccttcgataaagcaggaacagtcaccgctgggaacgcgtctggtattaacgacggtgctgccgctctggtgattatggaagaatctgcggcgctggcagcaggccttacccccctggctcgcattaaaagttatgccagcggtggcgtgccccccgcattgatgggtatggggccagtacctgccacgcaaaaagcgttacaactggcggggctgcaactggcggatattgatctcattgaggctaatgaagcatttgctgcacagttccttgccgttgggaaaaacctgggctttgattctgagaaagtgaatgtcaacggcggggccatcgcgctcgggcatcctatcggtgccagtggtgctcgtattctggtcacactattacatgccatgcaggcacgcgataaaacgctggggctggcaacactgtgcattggcggcggtcagggaattgcgatggtgattgaacggttgaattaagaggtaagtttataggaggaattccatatgatatggaaacggaaaatcaccctggaagcactgaatgctatgggtgaaggaaacatggtggggttcctggatattcgctttgaacatattggtgatgacacccttgaagcgacaatgccagtagactcgcggacaaagcagcctttcgggttgctgcatggaggagcatccgtggtactggccgaaagtatcggttccgttgccggttatttatgtaccgaaggtgagcaaaaagtggttggtctggaaatcaatgctaaccacgtccgctcggcacgagaagggcgggtgcgcggcgtatgcaaaccgttgcatctcggttcgcgtcaccaggtctggcagattgaaatcttcgatgagaaagggcgtttgtgctgttcgtcacgattgacgaccgccattttgtgaatttacacgatcgacgtgctcagctagcacccggaattgtgagcggataacaattccttggaattgtgagcggataacaattataattaagttgttaggaggttagaatgctcctatttccaagaagaactaatatagcctttttcaaaacaacaggcatttttgctaattttcctttgctaggtagaaccattacaacttcaccatctttccttacacataaactgtcaaaggaagtaaccagggcatcaacttcgcctccaagaccaaagagaattgttgtcgcaattactggtgcgactggtgttgcactgggaatcagacttctacaagtgctaaaagagttgagcgtagaaacccatttggtgatttcaaaatggggtgcagcaacaatgaaatatgaaacagattgggaaccgcatgacgtggcggccttggcaaccaagacatactctgttcgtgatgtttctgcatgcatttcgtccggatctttccagcatgatggtatgattgttgtgccctgttccatgaaatcactagctgctattagaatcggttttacagaggatttaattacaagagctgccgatgtttcgattaaagagaatcgtaagttactactggttactcgggaaacccctttatcttccatccatcttgaaaacatgttgtctttatgcagggcaggtgttataatttttcctccggtacctgcgttttatacaagacccaagagccttcatgacctattagaacaaagtgttggcaggatcctagactgctttggcatccacgctgacacttttcctcgttgggaaggaataaaaagcaagtaaactatcgaggaggatcaatgacgttaggaattgataaaatcaacttctatgtccccaaatattacgtggatatggcgaaattagcagaggcaagacaagttgatcccaacaagttcctcatcggtattggacagactgaaatggctgtttctcctgtcaatcaggacattgtaagtatgggtgcaaatgcagctaaggacataatcacagatgaggacaaaaagaaaatcggaatggtaatagtcgcaacagaatctgcagtagatgcagctaaagcagcagcagttcaaattcacaatttattagggattcaaccttttgcgagatgtttcgaaatgaaggaagcatgttatgctgcaactccagctatccaattggcaaaggactatctagctacaagacctaacgagaaagttttggtcatagctactgatactgctagatacggacttaactcaggaggtgaacctacacaaggtgcaggtgcagtagcaatggtcatatcccacaatcctagtatactcgcattaaacgaggatgcagttgcatatacggaagatgtgtacgacttttggagacctactggtcataagtaccctctagttgatggagctctttctaaggacgcttatatccgaagttttcaacagtcttggaatgagtatgcgaaaagacaaggcaaatccttagcagatttcgcaagtttatgcttccatgttcccttcactaaaatggggaaaaaagcgttagagtccatcatagataacgctgatgaaaccactcaagagagacttagatccggttatgaagatgctgtggactataaccgctatgttgggaacatttacacgggaagtttgtacctgtcactcatatccttgcttgagaatcgtgacttacaagcaggtgaaacgattggattgttctcgtatggaagtggtagtgtaggggagttttacagtgcgacgttagtagaaggctataaggaccatcttgatcaagctgcacataaagctctccttaataaccgtaccgaagttagtgtagatgcttacgagaccttctttaagaggtttgatgacgttgatttcgacgaacaacaagatgctgtacatgaagatcgtcatatcttctacctgagtaacatcgagaataacgtcagagagtaccatagaccagaatagacataggaggacgatatgagcgatttcagcaccctcgaagtgatccgcgacccgcgcggcttcgccaccctgtggttaagccgtgaggacaagaacaacgccttcaatgcgcagatgatccgcgagctgatcgtggccatcgaccagttggccgaagacgccagcctgcgctttgtgctgctgcgcggccgtggccggcacttcagcgccggtgccgacctggcctggatgcagcagtcggcgcaactggacttcaacaccaacctggatgatgcccacgaactgggcgagctgatgtacgccctgcatcgcctcaaggccccgaccctggccgtggtgcaaggtgcagcctttggcggcgcgctgggcctgatcagctgctgcgacatggccatcggcgccgaagacgcccaactgtgcctgtcggaagtacgcatcggcctggccccggcggtcatcagcccgttcgtggtcaaggccattggcgaacgcgccgcgcgccgctacgccctcaccgccgagcgtttcactggcgtgcgcgcacgcgagctgggcctgctggccgaggtgtacccggccagcgaactggacgaccacgtcgaagcctgggtaagcaacctgctgcagaacagcccgcaagcattgcgcgccaccaaggacttgctgcgcgaagtggacgacggcgaactcagcccggccctgcgccgttactgcgaaaacaccatcgcccgtatccgcgtcagcgccgaaggccaggagggcctgcgcgctttcctggaaaaacgccgccctgcctggcaaaccgttgacaagaaggagccgcgcccatgaactacgaggaggactacatgaacccggactaccgcagcatccagcgcctcctggtcgccaaccgcggcgagatcgcctgccgggtgatgcgcagcgcgcgcgccctcggcatcggcagcgtcgccgtgcacagcgacatcgaccgccacgcccgccacgtcgccgaagccgacatcgccgtcgacctgggcggcgccaagcccgccgacagctacctgcgcggcgacaggatcatcgcagctgccctcgccagcggcgcccaggcgatccaccccggctacggcttcctctcggagaacgccgacttcgcccgcgcctgcgaggaagccggcctgctcttcctcggaccgccggcggcggccatcgacgccatgggcagcaagtcggccgccaaggcgctgatggaagaagccggcgtgccgctggtgcccggctatcacggcgaagcccaggacctcgagactttccgccgggaagccgggcgcatcggctacccggtgctgctcaaggccgccgctggcggcggcggcaagggcatgaaggtggtggagcgcgaggccgagctggccgaggccctttcctccgcccagcgcgaggccaaggccgccttcggcgacgcgcgtatgctggtggagaaatacctgctgaagccgcgccacgtggagatccaggtattcgccgaccgccatggccactgcctgtacctcaacgaacgcgactgttcgatccagcgccgccaccagaaggtcgtcgaggaagcccccgcccccggtctcggcgcggaactgcgccgggccatgggcgaggccgcggtacgcgcggcgcaggcgatcggctacgtcggcgccggtaccgtcgaattcctcctcgacgaacgcggccagttcttcttcatggaaatgaacacccgcctgcaggtggaacacccggtcaccgaggccatcaccggcctcgacctggtcgcctggcagatccgcgtcgctcgcggcgaggcgctaccgctgacgcaggaacaggtaccgctgaacggccacgccatcgaagtacggctctatgcggaagaccccgagggcgacttcctccccgccagcggccgcctgatgctataccgcgaagcggccgccggccccggccggcgggtcgacagcggggtacgcgaaggcgacgaggtctcgccgttctacgacccgatgctggccaagctgatcgcctggggcgaaacccgcgaggaagcccgccagcgcctgctggcgatgctggcggaaacctcggtcggcggcctgcgcaccaacctggcgttcctccgccgcatcctcggccatccggcgttcgccgccgccgaactggacaccgggttcatcgcgcgccaccaagacgacctgctgccggcgccgcaagcgctgccggagcatttctggcaagccgccgccgaagcctggctgcagagcgaaccgggccaccgtcgcgacgacgacccgcattcgccgtggagccgcaacgacggctggcgcagcgccctggcgcgggagtccgacctgatgctgcgctgccgcgacgaacgccgctgcgtccgcctgcgccacgccagccccagccagtatcgcctcgacggcgacgacctggtcagccgggtggacggtgtcacccgtcgctcggcggcgttgcgccgcggacgccaattgttcctcgaatgggagggcgaactgctggccatcgaagccgtcgacccgatcgccgaggccgaggccgcccatgcccaccagggcggtttgagcgcgccgatgaacggcagtatcgtgcgggtcctggtcgagcccggccagacggtcgaagccggcgccaccctggtggtgctggaggcgatgaagatggaacacagcatccgcgcgccccacgccggggtagtgaaggcgctgtattgcagcgagggcgaactggtcgaggaaggcacgccgctggtggagctggacgagaaccaggcctgaacgtaaggaggattcaatggccatcctgcacacccagatcaatccacgctccgccgagttcgcggccaacgccgcgaccatgctggaacaggtcaacgccctgcgcaccctcctcggccgcatccacgaaggcggcggtagcgccgcccaggcccggcacagcgcgcgcggcaagctgctggtgcgcgaacgcatcaaccgcctgctcgaccccggctcgccgttcctcgagctttccgccctcgccgcccacgaagtctacggcgaagaggtcgccgccgccggcatcgtcgccgggatcggccgggtcgaaggggtggaatgcatgatcgtcggcaacgatgccacggtgaagggcggcacctactatccgctgaccgtgaagaagcacctgcgggcccaggccatcgccctggagaaccgcctgccatgcatctacctggtggactctggcggcgccaacctgccgcgccaggacgaggtgttccccgaccgcgagcacttcggccggatcttcttcaaccaggccaacatgagtgcccgcggcatcccgcagatcgccgtggtcatgggctcctgcaccgccggcggggcctacgtgccggcgatgtccgacgaaaccgtgatggtgcgcgaacaggccaccatcttcctcgccgggccgccgctggtgaaggccgctaccggcgaggtggtcagcgccgaggaacttggcggcgccgacgtgcactgcaaggtctcaggggtcgccgaccactatgccgaggacgatgaccatgccctggccatcgcccgccgctgcgtcgccaacctcaactggcgcaagcagggccagctgcaatgccgtgcaccgcgcgcgccgctgtaccccgccgaggagctgtacggggtgattcccgccgacagcaagcagccctacgacgtgcgcgaagtgatcgcacggctggtggacggctccgagttcgacgaattcaaggcgctgttcggcaccaccctggtctgcggcttcgcccacctgcacggctatccgatcgccatcctggccaacaacgggatcctcttcgccgaggccgcgcagaaaggcgcgcacttcatcgagttggcctgccagcgtggcatcccgctgctgttcctgcagaacatcaccggtttcatggtcggccagaagtacgaggctggcggcatcgccaagcacggcgccaagctggtgaccgcggtggcctgcgcgcgggtgccgaagttcaccgtgctgatcggcggcagcttcggcgccggcaactacggcatgtgcggacgcgcctacgacccgcgcttcctgtggatgtggccgaacgcgaggatcggcgtgatgggcggcgaacaggccgccggggtgctcgcccaggtcaagcgcgagcaggccgagcgcgccggccagcagctcggcgtcgaagaggaggcgaagatcaaggcgccgatcctcgagcagtacgagcaccagggccatccctactactccagcgcgcgactgtgggacgacggcgtgatcgatccggcgcagacccgcgaggtcctcgccctggcgctttccgccgccctcaacgcccccatcgagccgaccgccttcggcgtgttccgcatgtgatactatcataaaaataagaagcctgcatttgcaggcttcttatttttat

SEQ ID NO: 37 - DNA, 10867 bp, artificial sequence
  plasmid SG601
aaggccagcaaaaggccaggaaccgtaaaaaggccgcgttgctggcgtttttccataggctccgcccccctgacgagcatcacaaaaatcgacgctcaagtcagaggtggcgaaacccgacaggactataaagataccaggcgtttccccctggaagctccctcgtgcgctctcctgttccgaccctgccgcttaccggatacctgtccgcctttctcccttcgggaagcgtggcgctttctcatagctcacgctgtaggtatctcagttcggtgtaggtcgttcgctccaagctgggctgtgtgcacgaaccccccgttcagcccgaccgctgcgccttatccggtaactatcgtcttgagtccaacccggtaagacacgacttatcgccactggcagcagccactggtaacaggattagcagagcgaggtatgtaggcggtgctacagagttcttgaagtggtggcctaactacggctacactagaagaacagtatttggtatctgcgctctgctgaagccagttaccttcggaaaaagagttggtagctcttgatccggcaaacaaaccaccgctggtagcggtggtttttttgtttgcaagcagcagattacgcgcagaaaaaaaggatctcaagaagatcctttgatcttttctacggggtctgacgctcagtggaacgaaaactcacgttaagggattttggtcatgagattatcaaaaaggatcttcacctagatccttttaaattaaaaatgaagttttaaatcaatctaaagtatatatgagtaaacttggtctgacagctcttcctttttcaatattattgaagcatttatcagggttattgtctcatgagcggatacatatttgaatgtatttagaaaaataaacaaataggggttccgcgcacatttccccgaaaagtgccacctgacggtcctgcatcagctcttatatattaagctaccaacttagtatataagccaaaacttaaatgtgctaccaacacatcaagccgttagagaactctatctatagcaatatttcaaatgtaccgacatacaagagaaacattaactatatatattcaatttatgagattatcttaacagatataaatgtaaattgcaataagtaagatttagaagtttatagcctttgtgtattggaagcagtacgcaaaggcttttttatttgataaaaattagaagtatatttattttttcataattaatttatgaaaatgaaagggggtgagcaaagtgacagaggaaagcagtatcttatcaaataacaaggtattagcaatatcattattgactttagcagtaaacattatgacttttatagtgcttgtagctaagtagtacgaaagggggagctttaaaaagctccttggaatacatagaattcataaattaatttatgaaaagaagggcgtatatgaaaacttgtaaaaattgcaaagagtttattaaagatactgaaatatgcaaaatacattcgttgatgattcatgataaaacagtagcaacctattgcagtaaatacaatgagtcaagatgtttacataaagggaaagtccaatgtattaattgttcaaagatgaaccgatatggatggtgtgccataaaaatgagatgttttacagaggaagaacagaaaaaagaacgtacatgcattaaatattatgcaaggagctttaaaaaagctcatgtaaagaagagtaaaaagaaaaaataatttatttattaatttaatattgagagtgccgacacagtatgcactaaaaaatatatctgtggtgtagtgagccgatacaaaaggatagtcactcgcattttcataatacatcttatgttatgattatgtgtcggtgggacttcacgacgaaaacccacaataaaaaaagagttcggggtagggttaagcatagttgaggcaactaaacaatcaagctaggatatgcagtagcagaccgtaaggtcgttgtttaggtgtgttgtaatacatacgctattaagatgtaaaaatacggataccaatgaagggaaaagtataatttttggatgtagtttgtttgttcatctatgggcaaactacgtccaaagccgtttccaaatctgctaaaaagtatatcctttctaaaatcaaagtcaagtatgaaatcataaataaagtttaattttgaagttattatgatattatgtttttctattaaaataaattaagtatatagaatagtttaataatagtatatacttaatgtgataagtgtctgacagtgtcacagaaaggatgattgttatggattataagcggccggccagtgggcaagttgaaaaattcacaaaaatgtggtataatatctttgttcattagagcgataaacttgaatttgagagggaacttagatggtatttgaaaaaattgataaaaatagttggaacagaaaagagtattttgaccactactttgcaagtgtaccttgtacctacagcatgaccgttaaagtggatatcacacaaataaaggaaaagggaatgaaactatatcctgcaatgctttattatattgcaatgattgtaaaccgccattcagagtttaggacggcaatcaatcaagatggtgaattggggatatatgatgagatgataccaagctatacaatatttcacaatgatactgaaacattttccagcctttggactgagtgtaagtctgactttaaatcatttttagcagattatgaaagtgatacgcaacggtatggaaacaatcatagaatggaaggaaagccaaatgctccggaaaacatttttaatgtatctatgataccgtggtcaaccttcgatggctttaatctgaatttgcagaaaggatatgattatttgattcctatttttactatggggaaatattataaagaagataacaaaattatacttcctttggcaattcaagttcatcacgcagtatgtgacggatttcacatttgccgttttgtaaacgaattgcaggaattgataaatagttaacttcaggtttgtctgtaactaaaaacaagtatttaagcaaaaacatcgtagaaatacggtgttttttgttaccctaagtttgttaagggatgcataaactgcatcccttaacttgtttttcgtgtacctattttttgtgaatcgattatgtcttttgcgcattcgtcgacaattgcatatattgataaaaataataatagtgggtataattaagttgttaggaggttagttagagtgaaaccagtaacgttatacgatgtcgcagagtatgccggtgtctcttatcagaccgtttcccgcgtggtgaaccaggccagccacgtttctgcgaaaacgcgggaaaaagtggaagcggcgatggcggagctgaattacattcccaaccgcgtggcacaacaactggcgggcaaacagtcgttgctgattggcgttgccacctccagtctggccctgcacgcgccgtcgcaaattgtcgcggcgattaaatctcgcgccgatcaactgggtgccagcgtggtggtgtcgatggtagaacgaagcggcgtcgaagcctgtaaagcggcggtgcacaatcttctcgcgcaacgcgtcagtgggctgatcattaactatccgctggatgaccaggatgccattgctgtggaagctgcctgcactaatgttccggcgttatttcttgatgtctctgaccagacacccatcaacagtattattttctcccatgaagacggtacgcgactgggcgtggagcatctggtcgcattgggtcaccagcaaatcgcgctgttagcgggcccattaagttctgtctcggcgcgtctgcgtctggctggctggcataaatatctcactcgcaatcaaattcagccgatagcggaacgggaaggcgactggagtgccatgtccggttttcaacaaaccatgcaaatgctgaatgagggcatcgttcccactgcgatgctggttgccaacgatcagatggcgctgggcgcaatgcgcgccattaccgagtccgggctgcgcgttggtgcggacatctcggtagtgggatacgacgataccgaagacagctcatgttatatcccgccgttaaccaccatcaaacaggattttcgcctgctggggcaaaccagcgtggaccgcttgctgcaactctctcagggccaggcggtgaagggcaatcagctgttgcccgtctcactggtgaaaagaaaaaccaccctggcgcccaatacgcaaaccgcctctccccgcgcgttggccgattcattaatgcagctggcacgacaggtttcccgactggaaagcgggcagtgagcgcaacgcaattaatgtaagttagctcactcattaggcaccgggatctcgaccgatgcccttgagagccttcaacccagtcagctccttccggtgggcgcggggcatgactagcatgatcgtgctcctgtcgttgaggacccggctaggctggcggggttgccttactggttagcagaatgaatcaccgatacgcggctcagctagcacccggaattgtgagcggataacaattccttggaattgtgagcggataacaattataattaagttgttaggaggttagaatgagcgatttcagcaccctcgaagtgatccgcgacccgcgcggcttcgccaccctgtggttaagccgtgaggacaagaacaacgccttcaatgcgcagatgatccgcgagctgatcgtggccatcgaccagttggccgaagacgccagcctgcgctttgtgctgctgcgcggccgtggccggcacttcagcgccggtgccgacctggcctggatgcagcagtcggcgcaactggacttcaacaccaacctggatgatgcccacgaactgggcgagctgatgtacgccctgcatcgcctcaaggccccgaccctggccgtggtgcaaggtgcagcctttggcggcgcgctgggcctgatcagctgctgcgacatggccatcggcgccgaagacgcccaactgtgcctgtcggaagtacgcatcggcctggccccggcggtcatcagcccgttcgtggtcaaggccattggcgaacgcgccgcgcgccgctacgccctcaccgccgagcgtttcactggcgtgcgcgcacgcgagctgggcctgctggccgaggtgtacccggccagcgaactggacgaccacgtcgaagcctgggtaagcaacctgctgcagaacagcccgcaagcattgcgcgccaccaaggacttgctgcgcgaagtggacgacggcgaactcagcccggccctgcgccgttactgcgaaaacaccatcgcccgtatccgcgtcagcgccgaaggccaggagggcctgcgcgctttcctggaaaaacgccgccctgcctggcaaaccgttgacaagaaggagccgcgcccatgaacgatagggaggactgcaatgaacccggactaccgcagcatccagcgcctcctggtcgccaaccgcggcgagatcgcctgccgggtgatgcgcagcgcgcgcgccctcggcatcggcagcgtcgccgtgcacagcgacatcgaccgccacgcccgccacgtcgccgaagccgacatcgccgtcgacctgggcggcgccaagcccgccgacagctacctgcgcggcgacaggatcatcgcagctgccctcgccagcggcgcccaggcgatccaccccggctacggcttcctctcggagaacgccgacttcgcccgcgcctgcgaggaagccggcctgctcttcctcggaccgccggcggcggccatcgacgccatgggcagcaagtcggccgccaaggcgctgatggaagaagccggcgtgccgctggtgcccggctatcacggcgaagcccaggacctcgagactttccgccgggaagccgggcgcatcggctacccggtgctgctcaaggccgccgctggcggcggcggcaagggcatgaaggtggtggagcgcgaggccgagctggccgaggccctttcctccgcccagcgcgaggccaaggccgccttcggcgacgcgcgtatgctggtggagaaatacctgctgaagccgcgccacgtggagatccaggtattcgccgaccgccatggccactgcctgtacctcaacgaacgcgactgttcgatccagcgccgccaccagaaggtcgtcgaggaagcccccgcccccggtctcggcgcggaactgcgccgggccatgggcgaggccgcggtacgcgcggcgcaggcgatcggctacgtcggcgccggtaccgtcgaattcctcctcgacgaacgcggccagttcttcttcatggaaatgaacacccgcctgcaggtggaacacccggtcaccgaggccatcaccggcctcgacctggtcgcctggcagatccgcgtcgctcgcggcgaggcgctaccgctgacgcaggaacaggtaccgctgaacggccacgccatcgaagtacggctctatgcggaagaccccgagggcgacttcctccccgccagcggccgcctgatgctataccgcgaagcggccgccggccccggccggcgggtcgacagcggggtacgcgaaggcgacgaggtctcgccgttctacgacccgatgctggccaagctgatcgcctggggcgaaacccgcgaggaagcccgccagcgcctgctggcgatgctggcggaaacctcggtcggcggcctgcgcaccaacctggcgttcctccgccgcatcctcggccatccggcgttcgccgccgccgaactggacaccgggttcatcgcgcgccaccaagacgacctgctgccggcgccgcaagcgctgccggagcatttctggcaagccgccgccgaagcctggctgcagagcgaaccgggccaccgtcgcgacgacgacccgcattcgccgtggagccgcaacgacggctggcgcagcgccctggcgcgggagtccgacctgatgctgcgctgccgcgacgaacgccgctgcgtccgcctgcgccacgccagccccagccagtatcgcctcgacggcgacgacctggtcagccgggtggacggtgtcacccgtcgctcggcggcgttgcgccgcggacgccaattgttcctcgaatgggagggcgaactgctggccatcgaagccgtcgacccgatcgccgaggccgaggccgcccatgcccaccagggcggtttgagcgcgccgatgaacggcagtatcgtgcgggtcctggtcgagcccggccagacggtcgaagccggcgccaccctggtggtgctggaggcgatgaagatggaacacagcatccgcgcgccccacgccggggtagtgaaggcgctgtattgcagcgagggcgaactggtcgaggaaggcacgccgctggtggagctggacgagaaccaggcctgagttgaggaggtagataatgtctgccaattttactgataaaaatggtcgccaatcaaaaggagttcttttactacgaactttggcgatgccttctgacaccaatgctaacggagatatttttggtggctggattatgtctcaaatggatatgggcggcgcgattttagcgaaagaaatcgcacacggacgcgtggttactgttgccgttgaaagtatgaattttatcaaaccaatctctgtgggcgatgttgtttgttgctacggtgaatgtctcaaagttgggcgttcttccattaaaattaaagtagaagtatgggtaaaaaaagtggcgagtgagccaattggcgaacgttattgtgtcaccgatgcggtatttacttttgttgcagttgataataatggtcgctctcgcacgattccccgtgaaaataaccaagagttagaaaaagcattagccttaatttcagaacaacccttgtaaaaaggagtgtatataaatggaaaactttatcggaagccacatgatttatacgtatgaaaacggatgggaatacgagatttatattaaaaacgaccatacaattgattatagaattcatagcggaatggttgccggacgctgggttcgagatcaggaagtgaatattgtcaaactgacagaaggcgtatataaagtgtcttggacagagccgactggcacggatgtttcattaaactttatgccaaatgaaaaacgcatgcatggcattattttcttcccgaaatgggtgcatgaacatcctgaaattacggtttgctaccaaaatgaccacattgatttgatgaaagaatcccgcgaaaaatatgaaacgtatccaaaatacgttgtacctgaatttgcggaaattacatttctgaaaaatgaaggagtcgacaacgaagaagtgatttcgaaggctccttatgagggaatgacagacgatattcgcgcgggaagattataaacagacaggaggacatacatgacgttaggaattgataaaatcaacttctatgtccccaaatattacgtggatatggcgaaattagcagaggcaagacaagttgatcccaacaagttcctcatcggtattggacagactgaaatggctgtttctcctgtcaatcaggacattgtaagtatgggtgcaaatgcagctaaggacataatcacagatgaggacaaaaagaaaatcggaatggtaatagtcgcaacagaatctgcagtagatgcagctaaagcagcagcagttcaaattcacaatttattagggattcaaccttttgcgagatgtttcgaaatgaaggaagcatgttatgctgcaactccagctatccaattggcaaaggactatctagctacaagacctaacgagaaagttttggtcatagctactgatactgctagatacggacttaactcaggaggtgaacctacacaaggtgcaggtgcagtagcaatggtcatatcccacaatcctagtatactcgcattaaacgaggatgcagttgcatatacggaagatgtgtacgacttttggagacctactggtcataagtaccctctagttgatggagctctttctaaggacgcttatatccgaagttttcaacagtcttggaatgagtatgcgaaaagacaaggcaaatccttagcagatttcgcaagtttatgcttccatgttcccttcactaaaatggggaaaaaagcgttagagtccatcatagataacgctgatgaaaccactcaagagagacttagatccggttatgaagatgctgtggactataaccgctatgttgggaacatttacacgggaagtttgtacctgtcactcatatccttgcttgagaatcgtgacttacaagcaggtgaaacgattggattgttctcgtatggaagtggtagtgtaggggagttttacagtgcgacgttagtagaaggctataaggaccatcttgatcaagctgcacataaagctctccttaataaccgtaccgaagttagtgtagatgcttacgagaccttctttaagaggtttgatgacgttgatttcgacgaacaacaagatgctgtacatgaagatcgtcatatcttctacctgagtaacatcgagaataacgtcagagagtaccatagaccagaatagacagtaggaggactagcatgacgcgtgaagtggtagtggtaagcggtgtccgtaccgcgatcgggacctttggcggcagcctgaaggatgtggcaccggcggagctgggcgcactggtggtgcgcgaggcgctggcgcgcgcgcaggtgtcgggcgacgatgtcggccacgtggtattcggcaacgtgatccagaccgagccgcgcgacatgtatctgggccgcgtcgcggccgtcaacggcggggtgacgatcaacgcccccgcgctgaccgtgaaccgcctgtgcggctcgggcctgcaggccattgtcagcgccgcgcagaccatcctgctgggcgataccgacgtcgccatcggcggcggcgcggaaagcatgagccgcgcaccgtacctggcgccggcagcgcgctggggcgcacgcatgggcgacgccggcctggtcgacatgatgctgggtgcgctgcacgatcccttccatcgcatccacatgggcgtgaccgccgagaatgtcgccaaggaatacgacatctcgcgcgcgcagcaggacgaggccgcgctggaatcgcaccgccgcgcttcggcagcgatcaaggccggctacttcaaggaccagatcgtcccggtggtgagcaagggccgcaagggcgacgtgaccttcgacaccgacgagcacgtgcgccatgacgccaccatcgacgacatgaccaagctcaggccggtcttcgtcaaggaaaacggcacggtcacggccggcaatgcctcgggcctgaacgacgccgccgccgcggtggtgatgatggagcgcgccgaagccgagcgccgcggcctgaagccgctggcccgcctggtgtcgtacggccatgccggcgtggacccgaaggccatgggcatcggcccggtgccggcgacgaagatcgcgctggagcgcgccggcctgcaggtgtcggacctggacgtgatcgaagccaacgaagcctttgccgcacaggcgtgcgccgtgaccaaggcgctcggtctggacccggccaaggttaacccgaacggctcgggcatctcgctgggccacccgatcggcgccaccggtgccctgatcacggtgaaggcgctgcatgagctgaaccgcgtgcagggccgctacgcgctggtgacgatgtgcatcggcggcgggcagggcattgccgccatcttcgagcgtatctgagctatcataaaaataagaagcctgcatttgcaggcttcttatttttat

SEQ ID NO: 38 - DNA, 19162 bp, artificial sequence
  plasmid SG498
aaggccagcaaaaggccaggaaccgtaaaaaggccgcgttgctggcgtttttccataggctccgcccccctgacgagcatcacaaaaatcgacgctcaagtcagaggtggcgaaacccgacaggactataaagataccaggcgtttccccctggaagctccctcgtgcgctctcctgttccgaccctgccgcttaccggatacctgtccgcctttctcccttcgggaagcgtggcgctttctcatagctcacgctgtaggtatctcagttcggtgtaggtcgttcgctccaagctgggctgtgtgcacgaaccccccgttcagcccgaccgctgcgccttatccggtaactatcgtcttgagtccaacccggtaagacacgacttatcgccactggcagcagccactggtaacaggattagcagagcgaggtatgtaggcggtgctacagagttcttgaagtggtggcctaactacggctacactagaagaacagtatttggtatctgcgctctgctgaagccagttaccttcggaaaaagagttggtagctcttgatccggcaaacaaaccaccgctggtagcggtggtttttttgtttgcaagcagcagattacgcgcagaaaaaaaggatctcaagaagatcctttgatcttttctacggggtctgacgctcagtggaacgaaaactcacgttaagggattttggtcatgagattatcaaaaaggatcttcacctagatccttttaaattaaaaatgaagttttaaatcaatctaaagtatatatgagtaaacttggtctgacagctcttcctttttcaatattattgaagcatttatcagggttattgtctcatgagcggatacatatttgaatgtatttagaaaaataaacaaataggggttccgcgcacatttccccgaaaagtgccacctgacggtcctgcatcagctcttatatattaagctaccaacttagtatataagccaaaacttaaatgtgctaccaacacatcaagccgttagagaactctatctatagcaatatttcaaatgtaccgacatacaagagaaacattaactatatatattcaatttatgagattatcttaacagatataaatgtaaattgcaataagtaagatttagaagtttatagcctttgtgtattggaagcagtacgcaaaggcttttttatttgataaaaattagaagtatatttattttttcataattaatttatgaaaatgaaagggggtgagcaaagtgacagaggaaagcagtatcttatcaaataacaaggtattagcaatatcattattgactttagcagtaaacattatgacttttatagtgcttgtagctaagtagtacgaaagggggagctttaaaaagctccttggaatacatagaattcataaattaatttatgaaaagaagggcgtatatgaaaacttgtaaaaattgcaaagagtttattaaagatactgaaatatgcaaaatacattcgttgatgattcatgataaaacagtagcaacctattgcagtaaatacaatgagtcaagatgtttacataaagggaaagtccaatgtattaattgttcaaagatgaaccgatatggatggtgtgccataaaaatgagatgttttacagaggaagaacagaaaaaagaacgtacatgcattaaatattatgcaaggagctttaaaaaagctcatgtaaagaagagtaaaaagaaaaaataatttatttattaatttaatattgagagtgccgacacagtatgcactaaaaaatatatctgtggtgtagtgagccgatacaaaaggatagtcactcgcattttcataatacatcttatgttatgattatgtgtcggtgggacttcacgacgaaaacccacaataaaaaaagagttcggggtagggttaagcatagttgaggcaactaaacaatcaagctaggatatgcagtagcagaccgtaaggtcgttgtttaggtgtgttgtaatacatacgctattaagatgtaaaaatacggataccaatgaagggaaaagtataatttttggatgtagtttgtttgttcatctatgggcaaactacgtccaaagccgtttccaaatctgctaaaaagtatatcctttctaaaatcaaagtcaagtatgaaatcataaataaagtttaattttgaagttattatgatattatgtttttctattaaaataaattaagtatatagaatagtttaataatagtatatacttaatgtgataagtgtctgacagtgtcacagaaaggatgattgttatggattataagcggccggccagtgggcaagttgaaaaattcacaaaaatgtggtataatatctttgttcattagagcgataaacttgaatttgagagggaacttagatggtatttgaaaaaattgataaaaatagttggaacagaaaagagtattttgaccactactttgcaagtgtaccttgtacctacagcatgaccgttaaagtggatatcacacaaataaaggaaaagggaatgaaactatatcctgcaatgctttattatattgcaatgattgtaaaccgccattcagagtttaggacggcaatcaatcaagatggtgaattggggatatatgatgagatgataccaagctatacaatatttcacaatgatactgaaacattttccagcctttggactgagtgtaagtctgactttaaatcatttttagcagattatgaaagtgatacgcaacggtatggaaacaatcatagaatggaaggaaagccaaatgctccggaaaacatttttaatgtatctatgataccgtggtcaaccttcgatggctttaatctgaatttgcagaaaggatatgattatttgattcctatttttactatggggaaatattataaagaagataacaaaattatacttcctttggcaattcaagttcatcacgcagtatgtgacggatttcacatttgccgttttgtaaacgaattgcaggaattgataaatagttaacttcaggtttgtctgtaactaaaaacaagtatttaagcaaaaacatcgtagaaatacggtgttttttgttaccctaagtttgttaagggatgcataaactgcatcccttaacttgtttttcgtgtacctattttttgtgaatcgattatgtcttttgcgcattcgtcgacaattgcatatattgataaaaataataatagtgggtataattaagttgttaggaggttagttagagtgaaaccagtaacgttatacgatgtcgcagagtatgccggtgtctcttatcagaccgtttcccgcgtggtgaaccaggccagccacgtttctgcgaaaacgcgggaaaaagtggaagcggcgatggcggagctgaattacattcccaaccgcgtggcacaacaactggcgggcaaacagtcgttgctgattggcgttgccacctccagtctggccctgcacgcgccgtcgcaaattgtcgcggcgattaaatctcgcgccgatcaactgggtgccagcgtggtggtgtcgatggtagaacgaagcggcgtcgaagcctgtaaagcggcggtgcacaatcttctcgcgcaacgcgtcagtgggctgatcattaactatccgctggatgaccaggatgccattgctgtggaagctgcctgcactaatgttccggcgttatttcttgatgtctctgaccagacacccatcaacagtattattttctcccatgaagacggtacgcgactgggcgtggagcatctggtcgcattgggtcaccagcaaatcgcgctgttagcgggcccattaagttctgtctcggcgcgtctgcgtctggctggctggcataaatatctcactcgcaatcaaattcagccgatagcggaacgggaaggcgactggagtgccatgtccggttttcaacaaaccatgcaaatgctgaatgagggcatcgttcccactgcgatgctggttgccaacgatcagatggcgctgggcgcaatgcgcgccattaccgagtccgggctgcgcgttggtgcggacatctcggtagtgggatacgacgataccgaagacagctcatgttatatcccgccgttaaccaccatcaaacaggattttcgcctgctggggcaaaccagcgtggaccgcttgctgcaactctctcagggccaggcggtgaagggcaatcagctgttgcccgtctcactggtgaaaagaaaaaccaccctggcgcccaatacgcaaaccgcctctccccgcgcgttggccgattcattaatgcagctggcacgacaggtttcccgactggaaagcgggcagtgagcgcaacgcaattaatgtaagttagctcactcattaggcaccgggatctcgaccgatgcccttgagagccttcaacccagtcagctccttccggtgggcgcggggcatgactagcatgatcgtgctcctgtcgttgaggacccggctaggctggcggggttgccttactggttagcagaatgaatcaccgatacgcggctcagctagcacccggaattgtgagcggataacaattccttggaattgtgagcggataacaattataattaagttgttaggaggttagaatgaaaaattgtgtcatcgtcagtgcggtacgtactgctatcggtagttttaacggttcactcgcttccaccagcgccatcgacctgggggcgacagtaattaaagccgccattgaacgtgcaaaaatcgattcacaacacgttgatgaagtgattatgggtaacgtgttacaagccgggctggggcaaaatccggcgcgtcaggcactgttaaaaagcgggctggcagaaacggtgtgcggattcacggtcaataaagtatgtggttcgggtcttaaaagtgtggcgcttgccgcccaggccattcaggcaggtcaggcgcagagcattgtggcggggggtatggaaaatatgagtttagccccctacttactcgatgcaaaagcacgctctggttatcgtcttggagacggacaggtttatgacgtaatcctgcgcgatggcctgatgtgcgccacccatggttatcatatggggattaccgccgaaaacgtggctaaagagtacggaattacccgtgaaatgcaggatgaactggcgctacattcacagcgtaaagcggcagccgcaattgagtccggtgcttttacagccgaaatcgtcccggtaaatgttgtcactcgaaagaaaaccttcgtcttcagtcaagacgaattcccgaaagcgaattcaacggctgaagcgttaggtgcattgcgcccggccttcgataaagcaggaacagtcaccgctgggaacgcgtctggtattaacgacggtgctgccgctctggtgattatggaagaatctgcggcgctggcagcaggccttacccccctggctcgcattaaaagttatgccagcggtggcgtgccccccgcattgatgggtatggggccagtacctgccacgcaaaaagcgttacaactggcggggctgcaactggcggatattgatctcattgaggctaatgaagcatttgctgcacagttccttgccgttgggaaaaacctgggctttgattctgagaaagtgaatgtcaacggcggggccatcgcgctcgggcatcctatcggtgccagtggtgctcgtattctggtcacactattacatgccatgcaggcacgcgataaaacgctggggctggcaacactgtgcattggcggcggtcagggaattgcgatggtgattgaacggttgaattaatagggaggtctgtttaatgaaaaaggtatgtgttataggtgcaggtactatgggttcaggaattgctcaggcatttgcagctaaaggatttgaagtagtattaagagatattaaagatgaatttgttgatagaggattagattttatcaataaaaatctttctaaattagttaaaaaaggaaagatagaagaagctactaaagttgaaatcttaactagaatttccggaacagttgaccttaatatggcagctgattgcgatttagttatagaagcagctgttgaaagaatggatattaaaaagcagatttttgctgacttagacaatatatgcaagccagaaacaattcttgcatcaaatacatcatcactttcaataacagaagtggcatcagcaactaaaagacctgataaggttataggtatgcatttctttaatccagctcctgttatgaagcttgtagaggtaataagaggaatagctacatcacaagaaacttttgatgcagttaaagagacatctatagcaataggaaaagatcctgtagaagtagcagaagcaccaggatttgttgtaaatagaatattaataccaatgattaatgaagcagttggtatattagcagaaggaatagcttcagtagaagacatagataaagctatgaaacttggagctaatcacccaatgggaccattagaattaggtgattttataggtcttgatatatgtcttgctataatggatgttttatactcagaaactggagattctaagtatagaccacatacattacttaagaagtatgtaagagcaggatggcttggaagaaaatcaggaaaaggtttctacgattattcaaaataagtttacaagaatccctttaggaggattagtcatggaactaaacaatgtcatccttgaaaaggaaggtaaagttgctgtagttaccattaacagacctaaagcattaaatgcgttaaatagtgatacactaaaagaaatggattatgttataggtgaaattgaaaatgatagcgaagtacttgcagtaattttaactggagcaggagaaaaatcatttgtagcaggagcagatatttctgagatgaaggaaatgaataccattgaaggtagaaaattcgggatacttggaaataaagtgtttagaagattagaacttcttgaaaagcctgtaatagcagctgttaatggttttgctttaggaggcggatgcgaaatagctatgtcttgtgatataagaatagcttcaagcaacgcaagatttggtcaaccagaagtaggtctcggaataacacctggttttggtggtacacaaagactttcaagattagttggaatgggcatggcaaagcagcttatatttactgcacaaaatataaaggcagatgaagcattaagaatcggacttgtaaataaggtagtagaacctagtgaattaatgaatacagcaaaagaaattgcaaacaaaattgtgagcaatgctccagtagctgttaagttaagcaaacaggctattaatagaggaatgcagtgtgatattgatactgctttagcatttgaatcagaagcatttggagaatgcttttcaacagaggatcaaaaggatgcaatgacagctttcatagagaaaagaaaaattgaaggcttcaaaaatagataggaggtaagtttataggaggaattccatatgagcggcccgaccaccgataccccggcggcgattcagatttgccgcattatgcgcccggatgatgcgaacgtggcgggcaacgtgcatggcggcaccattctgaaaatgattgaagaagcgggcgcgattattagcacccgccattgcaacagccagaacggcgaacgctgcgtggcggcgctggcgcgcgtggaacgcaccgattttctgagcccgatgtgcattggcgaagtggcgcatgtgagcgcggaaattacctataccagcaaacatagcgtggaagtgcaggtgcatgtgatgagcgaaaacattctgaccggcaccaaaaaactgaccaacaaagcgaccctgtggtatgtgccgctgagcctgaaaaacgtggataaagtgctggaagtgccgccgattgtgtatctgcgccaggaacaggaagaagaaggccgcaaacgctatgaagcgcagaaactggaacgcatggaaaccaaatggcgcaacggcgatattgtgcagccggtgctgaacccggaaccgaacaccgtgagctatagccagagcagcctgattcatctggtgggcccgagcgattgcaccctgcatggctttgtgcatggcggcgtgaccatgaaactgatggatgaagtggcgggcattgtggcggcgcgccattgcaaaaccaacattgtgaccgcgagcgtggatgcgattaactttcatgataaaattcgcaaaggctgcgtgattaccattagcggccgcatgacctttaccagcaacaaaagcatggaaattgaagtgctggtggatgcggatccggtggtggataacagccagaaacgctatcgcgcggcgagcgcgttttttacctatgtgagcctgaaccaggaaggcaaaccgatgccggtgccgcagctggtgccggaaaccgaagatgaaaaaaaacgctttgaagaaggcaaaggccgctatctgcagatgaaagcgaaacgccagggccataccgaaccgcagccgtagacgataggaggacgtacatgattgtaaaaccaatggttaggaacaatatttgtctaaacgctcatccgcaaggatgcaaaaaaggcgttgaggatcaaatagagtacacaaaaaagagaattaccgctgaggtaaaagccggagcaaaagcccctaaaaacgtgctggttctcggctgctcgaacggttacggacttgcaagccggataacggcagcattcggctatggggccgccactatcggcgtttcctttgaaaaagccggaagcgaaacaaagtacggcacacccggctggtacaacaacctggcctttgacgaggctgccaaaagggaaggcctttattccgtaactatagacggagacgccttttccgatgaaatcaaggcacaagtaatcgaagaagccaaaaagaaaggaattaaattcgatcttatagtttacagcttggcaagccctgtaagaaccgatcccgacacaggcataatgcacaagtccgtcttaaaacccttcggtaaaacatttacaggcaagacagtcgatccctttacgggagaactaaaagaaatctccgccgaacctgcaaacgatgaagaagccgctgcaaccgttaaggttatgggaggagaagactgggaacgctggataaagcagctttcaaaagaaggtcttttagaagaaggctgcattaccctagcctattcctatatcggccctgaggccactcaagccctctaccgaaagggcaccataggaaaggcaaaagaacaccttgaagcaactgcccaccgcctaaacaaagaaaacccgtcaatacgggccttcgtttcggtgaacaagggcttggtaacaagggcaagtgcggtaatccccgtaattcccctatacctcgcttccttgtttaaggttatgaaagaaaaaggaaaccacgagggctgtatcgagcagattacccgcctttatgccgaaagactctaccgtaaagacggcaccatccccgtcgatgaagaaaacagaatccgtatcgacgactgggagcttgaagaagacgttcaaaaggcggtttcggctttaatggaaaaagtaaccggcgaaaatgccgaaagcctaaccgaccttgcaggctaccgccacgactttttagcctcaaacggctttgatgtagaaggcatcaactacgaagccgaggtagaaaggttcgacaggatttaaaacacaggaggacgataatgacgcgtgaagtggtagtggtaagcggtgtccgtaccgcgatcgggacctttggcggcagcctgaaggatgtggcaccggcggagctgggcgcactggtggtgcgcgaggcgctggcgcgcgcgcaggtgtcgggcgacgatgtcggccacgtggtattcggcaacgtgatccagaccgagccgcgcgacatgtatctgggccgcgtcgcggccgtcaacggcggggtgacgatcaacgcccccgcgctgaccgtgaaccgcctgtgcggctcgggcctgcaggccattgtcagcgccgcgcagaccatcctgctgggcgataccgacgtcgccatcggcggcggcgcggaaagcatgagccgcgcaccgtacctggcgccggcagcgcgctggggcgcacgcatgggcgacgccggcctggtcgacatgatgctgggtgcgctgcacgatcccttccatcgcatccacatgggcgtgaccgccgagaatgtcgccaaggaatacgacatctcgcgcgcgcagcaggacgaggccgcgctggaatcgcaccgccgcgcttcggcagcgatcaaggccggctacttcaaggaccagatcgtcccggtggtgagcaagggccgcaagggcgacgtgaccttcgacaccgacgagcacgtgcgccatgacgccaccatcgacgacatgaccaagctcaggccggtcttcgtcaaggaaaacggcacggtcacggccggcaatgcctcgggcctgaacgacgccgccgccgcggtggtgatgatggagcgcgccgaagccgagcgccgcggcctgaagccgctggcccgcctggtgtcgtacggccatgccggcgtggacccgaaggccatgggcatcggcccggtgccggcgacgaagatcgcgctggagcgcgccggcctgcaggtgtcggacctggacgtgatcgaagccaacgaagcctttgccgcacaggcgtgcgccgtgaccaaggcgctcggtctggacccggccaaggttaacccgaacggctcgggcatctcgctgggccacccgatcggcgccaccggtgccctgatcacggtgaaggcgctgcatgagctgaaccgcgtgcagggccgctacgcgctggtgacgatgtgcatcggcggcgggcagggcattgccgccatcttcgagcgtatctgaacagaggaggacgatacatgagcatcaggacagtgggcatcgtcggtgccggcaccatgggcaatggcatcgcccaggcctgcgcagtggtaggtctcaacgtggtgatggtcgacatcagcgatgccgccgtgcagaagggtgtcgccaccgtggcaagcagcctggaccgtctgatcaagaaggaaaagctgaccgaggccgacaaggccagcgcgctggcgcgcatcaagggcagcacctcgtatgacgatctcaaggccaccgatatcgtgatcgaggccgccaccgagaactacgacctgaaggtcaagatcctcaagcagatcgacggcatcgtcggcgagaacgtgatcatcgcgtccaacacctcgtcgatctcgatcaccaagctggctgccgtgacctcgcgcgccgaccgctttatcggcatgcacttcttcaacccggtgccggtgatggcgctggtggaactgatccgcggcctgcagaccagcgacaccacccacgccgccgtcgaggccctgtcgaagcagctcggcaaatacccgatcacggtcaagaacagcccgggcttcgtcgtcaaccgcatcctgtgcccgatgatcaacgaggccttctgcgtgctgggcgaaggcctggcctcgccggaagagatcgacgaaggcatgaagctgggctgcaaccacccgatcgggccgctggcgctggctgacatgatcggcctggacaccatgctggccgtgatggaagtgctgtacacggagtttgccgatccgaagtaccgcccggcgatgctgatgcgcgagatggtcgctgccggctacctgggccgcaagactggccgcggcgtgtacgtctatagcaagtaatttacacgatcgacgtgctcagctagcacccggaattgtgagcggataacaattccttggaattgtgagcggataacaattataattaagttgttaggaggttagaatgagtctgaatttccttgattttgaacagccgattgcagagctggaagcgaaaatcgattctctgactgcggttagccgtcaggatgagaaactggatattaacatcgatgaagaagtgcatcgtctgcgtgaaaaaagcgtagaactgacacgtaaaatcttcgccgatctcggtgcatggcagattgcgcaactggcacgccatccacagcgtccttataccctggattacgttcgcctggcatttgatgaatttgacgaactggctggcgaccgcgcgtatgcagacgataaagctatcgtcggtggtatcgcccgtctcgatggtcgtccggtgatgatcattggtcatcaaaaaggtcgtgaaaccaaagaaaaaattcgccgtaactttggtatgccagcgccagaaggttaccgcaaagcactgcgtctgatgcaaatggctgaacgctttaagatgccaatcatcacctttatcgacaccccgggggcttatccgggcgtgggcgcagaagagcgcggtcagtctgaagccattgcacgcaacctgcgtgaaatgtctcgccttagcgtaccgactatttgtaccgttatcggtgaaggtggttctggcggcgcgctggcgattggcgtgggcgataaagtgaatatgctgcaatacagcacctattccgttatctcgccggaaggttgtgcgtccattctgtggaagagcgctgataaagcgccgctggcggctgaagcgatgggtatcatcgctccgcgtctgaaagaactaaaactgatcgactccatcatcccagaaccgctgggtggtgctcaccgtaacccggaagcgatggcggcatcgttgaaagcgcaactgttggcggatctggccgatctcgacgtgttaagcactgaagatttaaaaaatcgtcgttatcagcgcctgatgagctacggttacgcgtaataaggaggaacccactcatggatattcgtaagattaaaaaactgatcgagctggttgaagaatcaggcatctccgaactggaaatttctgaaggcgaagagtcagtacgcattagccgtgcagctcctgccgcaagtttccctgtgatgcaacaagcttacgctgcaccaatgatgcagcagccagctcaatctaacgcagccgctccggcgaccgttccttccatggaagcgccagcagcagcggaaatcagtggtcacatcgtacgttccccgatggttggtactttctaccgcaccccaagcccggacgcaaaagcgttcatcgaagtgggtcagaaagtcaacgtgggcgataccctgtgcatcgttgaagccatgaaaatgatgaaccagatcgaagcggacaaatccggtaccgtgaaagcaattctggtcgaaagtggacaaccggtagaatttgacgagccgctggtcgtcatcgagtaacgaggcgaacatgctggataaaattgttattgccaaccgcggcgagattgcattgcgtattcttcgtgcctgtaaagaactgggcatcaagactgtcgctgtgcactccagcgcggatcgcgatctaaaacacgtattactggcagatgaaacggtctgtattggccctgctccgtcagtaaaaagttatctgaacatcccggcaatcatcagcgccgctgaaatcaccggcgcagtagcaatccatccgggttacggcttcctctccgagaacgccaactttgccgagcaggttgaacgctccggctttatcttcattggcccgaaagcagaaaccattcgcctgatgggcgacaaagtatccgcaatcgcggcgatgaaaaaagcgggcgtcccttgcgtaccgggttctgacggcccgctgggcgacgatatggataaaaaccgtgccattgctaaacgcattggttatccggtgattatcaaagcctccggcggcggcggcggtcgcggtatgcgcgtagtgcgcggcgacgctgaactggcacaatccatctccatgacccgtgcggaagcgaaagctgctttcagcaacgatatggtttacatggagaaatacctggaaaatcctcgccacgtcgagattcaggtactggctgacggtcagggcaacgctatctatctggcggaacgtgactgctccatgcaacgccgccaccagaaagtggtcgaagaagcgccagcaccgggcattaccccggaactgcgtcgctacatcggcgaacgttgcgctaaagcgtgtgttgatatcggctatcgcggtgcaggtactttcgagttcctgttcgaaaacggcgagttctatttcatcgaaatgaacacccgtattcaggtagaacacccggttacagaaatgatcaccggcgttgacctgatcaaagaacagctgcgtatcgctgccggtcaaccgctgtcgatcaagcaagaagaagttcacgttcgcggccatgcggtggaatgtcgtatcaacgccgaagatccgaacaccttcctgccaagtccgggcaaaatcacccgtttccacgcacctggcggttttggcgtacgttgggagtctcatatctacgcgggctacaccgtaccgccgtactatgactcaatgatcggtaagctgatttgctacggtgaaaaccgtgacgtggcgattgcccgcatgaagaatgcgctgcaggagctgatcatcgacggtatcaaaaccaacgttgatctgcagatccgcatcatgaatgacgagaacttccagcatggtggcactaacatccactatctggagaaaaaactcggtcttcaggaaaaataatataggaggatataacatgagctggattgaacgaattaaaagcaacattactcccacccgcaaggcgagcattcctgaaggggtgtggactaagtgtgatagctgcggtcaggttttataccgcgctgagctggaacgtaatcttgaggtctgtccgaagtgtgaccatcacatgcgtatgacagcgcgtaatcgcctgcatagcctgttagatgaaggaagccttgtggagctgggtagcgagcttgagccgaaagatgtgctgaagtttcgtgactccaagaagtataaagaccgtctggcatctgcgcagaaagaaaccggcgaaaaagatgcgctggtggtgatgaaaggcactctgtatggaatgccggttgtcgctgcggcattcgagttcgcctttatgggcggttcaatggggtctgttgtgggtgcacgtttcgtgcgtgccgttgagcaggcgctggaagataactgcccgctgatctgcttctccgcctctggtggcgcacgtatgcaggaagcactgatgtcgctgatgcagatggcgaaaacctctgcggcactggcaaaaatgcaggagcgcggcttgccgtacatctccgtgctgaccgacccgacgatgggcggtgtttctgcaagtttcgccatgctgggcgatctcaacatcgctgaaccgaaagcgttaatcggctttgccggtccgcgtgttatcgaacagaccgttcgcgaaaaactgccgcctggattccagcgcagtgaattcctgatcgagaaaggcgcgatcgacatgatcgtccgtcgtccggaaatgcgcctgaaactggcgagtattctggcgaagttgatgaatctgccagcgccgaatcctgaagcgccgcgtgaaggcgtagtggtacccccggtaccggatcaggaacctgaggcctgagactaggaggatcttaaatgaccgacgtccgattccgcattatcggtacgggtgcctacgtaccggaacggatcgtctccaacgatgaagtcggcgcgccggccggggtggacgacgactggatcacccgcaagaccggtatccggcagcgtcgctgggccgccgacgaccaggccacctcggacctggccacggccgcggggcgggcagcgctgaaagcggcgggcatcacgcccgagcagctgaccgtgatcgcggtcgccacctccacgccggaccggccgcagccgcccacggcggcctatgtccagcaccacctcggtgcgaccggcactgcggcgttcgacgtcaacgcggtctgctccggcaccgtgttcgcgctgtcctcggtggcgggcaccctcgtgtaccggggcggttacgcgctggtcatcggcgcggacctgtactcgcgcatcctcaacccggccgaccgcaagacggtcgtgctgttcggggacggcgccggcgcaatggtcctcgggccgacctcgaccggcacgggccccatcgtccggcgcgtcgccctgcacaccttcggcggcctcaccgacctgatccgtgtgcccgcgggcggcagccgccagccgctggacacggatggcctcgacgcgggactgcagtacttcgcgatggacgggcgtgaggtgcgccgcttcgtcacggagcacctgccgcagctgatcaagggcttcctgcacgaggccggggtcgacgccgccgacatcagccacttcgtgccgcatcaggccaacggtgtcatgctcgacgaggtcttcggcgagctgcatctgccgcgggcgaccatgcaccggacggtcgagacctacggcaacacgggagcggcctccatcccgatcaccatggacgcggccgtgcgcgccggttccttccggccgggcgagctggtcctgctggccgggttcggcggcggcatggccgcgagcttcgccctgatcgagtggtaggctcagctagcacccggaattgtgagcggataacaattccttggaattgtgagcggataacaattataattaagttgttaggaggttagaatgactcagcgcattgcgtatgtgaccggcggcatgggtggtatcggaaccgccatttgccagcggctggccaaggatggctttcgtgtggtggccggttgcggccccaactcgccgcgccgcgaaaagtggctggagcagcagaaggccctgggcttcgatttcattgcctcggaaggcaatgtggctgactgggactcgaccaagaccgcattcgacaaggtcaagtccgaggtcggcgaggttgatgtgctgatcaacaacgccggtatcacccgcgacgtggtgttccgcaagatgacccgcgccgactgggatgcggtgatcgacaccaacctgacctcgctgttcaacgtcaccaagcaggtgatcgacggcatggccgaccgtggctggggccgcatcgtcaacatctcgtcggtgaacgggcagaagggccagttcggccagaccaactactccaccgccaaggccggcctgcatggcttcaccatggcactggcgcaggaagtggcgaccaagggcgtgaccgtcaacacggtctctccgggctatatcgccaccgacatggtcaaggcgatccgccaggacgtgctcgacaagatcgtcgcgacgatcccggtcaagcgcctgggcctgccggaagagatcgcctcgatctgcgcctggttgtcgtcggaggagtccggtttctcgaccggcgccgacttctcgctcaacggcggcctgcatatgggctgaacaggaggcaataaatgagcgcacaatccctggaagtaggccagaaggcccgtctcagcaagcggttcggggcggcggaggtagccgccttcgccgcgctctcggaggacttcaaccccctgcacctggacccggccttcgccgccaccacggcgttcgagcggcccatagtccacggcatgctgctcgccagcctcttctccgggctgctgggccagcagttgccgggcaaggggagcatctatctgggtcaaagcctcagcttcaagctgccggtctttgtcggggacgaggtgacggccgaggtggaggtgaccgcccttcgcgaggacaagcccatcgccaccctgaccacccgcatcttcacccaaggcggcgccctcgccgtgacgggggaagccgtggtcaagctgccttaagttgaggaggtagataatgtctacaacacataacgtccctcagggcgatcttgttttacgtactttagccatgcccgccgataccaatgccaatggtgacatctttggtggttggttaatgtcacaaatggatattggcggcgctattctggcaaaagaaattgcccacggtcgcgtagtgactgtgcgggttgaaggaatgactttcttacggccggttgcggtcggcgatgtggtgtgctgctatgcacgctgtgtccagaaagggacgacatcggtcagcattaatattgaagtgtgggtgaaaaaagtagcgtctgaaccaatcgggcaacggtataaagcgacagaagcattatttaagtatgtcgcggttgatcctgaaggaaaacctcgcgccttacctgttgagtaaagcgactgacgtaggaggatatcaatgctcctatttccaagaagaactaatatagcctttttcaaaacaacaggcatttttgctaattttcctttgctaggtagaaccattacaacttcaccatctttccttacacataaactgtcaaaggaagtaaccagggcatcaacttcgcctccaagaccaaagagaattgttgtcgcaattactggtgcgactggtgttgcactgggaatcagacttctacaagtgctaaaagagttgagcgtagaaacccatttggtgatttcaaaatggggtgcagcaacaatgaaatatgaaacagattgggaaccgcatgacgtggcggccttggcaaccaagacatactctgttcgtgatgtttctgcatgcatttcgtccggatctttccagcatgatggtatgattgttgtgccctgttccatgaaatcactagctgctattagaatcggttttacagaggatttaattacaagagctgccgatgtttcgattaaagagaatcgtaagttactactggttactcgggaaacccctttatcttccatccatcttgaaaacatgttgtctttatgcagggcaggtgttataatttttcctccggtacctgcgttttatacaagacccaagagccttcatgacctattagaacaaagtgttggcaggatcctagactgctttggcatccacgctgacacttttcctcgttgggaaggaataaaaagcaagtaatactatcataaaaataagaagcctgcatttgcaggcttcttatttttat

SEQ ID NO: 39 - DNA, 24794 bp, artificial sequence
  plasmid SG513
aaggccagcaaaaggccaggaaccgtaaaaaggccgcgttgctggcgtttttccataggctccgcccccctgacgagcatcacaaaaatcgacgctcaagtcagaggtggcgaaacccgacaggactataaagataccaggcgtttccccctggaagctccctcgtgcgctctcctgttccgaccctgccgcttaccggatacctgtccgcctttctcccttcgggaagcgtggcgctttctcatagctcacgctgtaggtatctcagttcggtgtaggtcgttcgctccaagctgggctgtgtgcacgaaccccccgttcagcccgaccgctgcgccttatccggtaactatcgtcttgagtccaacccggtaagacacgacttatcgccactggcagcagccactggtaacaggattagcagagcgaggtatgtaggcggtgctacagagttcttgaagtggtggcctaactacggctacactagaagaacagtatttggtatctgcgctctgctgaagccagttaccttcggaaaaagagttggtagctcttgatccggcaaacaaaccaccgctggtagcggtggtttttttgtttgcaagcagcagattacgcgcagaaaaaaaggatctcaagaagatcctttgatcttttctacggggtctgacgctcagtggaacgaaaactcacgttaagggattttggtcatgagattatcaaaaaggatcttcacctagatccttttaaattaaaaatgaagttttaaatcaatctaaagtatatatgagtaaacttggtctgacagctcttcctttttcaatattattgaagcatttatcagggttattgtctcatgagcggatacatatttgaatgtatttagaaaaataaacaaataggggttccgcgcacatttccccgaaaagtgccacctgacggtcctgcatcagctcttatatattaagctaccaacttagtatataagccaaaacttaaatgtgctaccaacacatcaagccgttagagaactctatctatagcaatatttcaaatgtaccgacatacaagagaaacattaactatatatattcaatttatgagattatcttaacagatataaatgtaaattgcaataagtaagatttagaagtttatagcctttgtgtattggaagcagtacgcaaaggcttttttatttgataaaaattagaagtatatttattttttcataattaatttatgaaaatgaaagggggtgagcaaagtgacagaggaaagcagtatcttatcaaataacaaggtattagcaatatcattattgactttagcagtaaacattatgacttttatagtgcttgtagctaagtagtacgaaagggggagctttaaaaagctccttggaatacatagaattcataaattaatttatgaaaagaagggcgtatatgaaaacttgtaaaaattgcaaagagtttattaaagatactgaaatatgcaaaatacattcgttgatgattcatgataaaacagtagcaacctattgcagtaaatacaatgagtcaagatgtttacataaagggaaagtccaatgtattaattgttcaaagatgaaccgatatggatggtgtgccataaaaatgagatgttttacagaggaagaacagaaaaaagaacgtacatgcattaaatattatgcaaggagctttaaaaaagctcatgtaaagaagagtaaaaagaaaaaataatttatttattaatttaatattgagagtgccgacacagtatgcactaaaaaatatatctgtggtgtagtgagccgatacaaaaggatagtcactcgcattttcataatacatcttatgttatgattatgtgtcggtgggacttcacgacgaaaacccacaataaaaaaagagttcggggtagggttaagcatagttgaggcaactaaacaatcaagctaggatatgcagtagcagaccgtaaggtcgttgtttaggtgtgttgtaatacatacgctattaagatgtaaaaatacggataccaatgaagggaaaagtataatttttggatgtagtttgtttgttcatctatgggcaaactacgtccaaagccgtttccaaatctgctaaaaagtatatcctttctaaaatcaaagtcaagtatgaaatcataaataaagtttaattttgaagttattatgatattatgtttttctattaaaataaattaagtatatagaatagtttaataatagtatatacttaatgtgataagtgtctgacagtgtcacagaaaggatgattgttatggattataagcggccggccagtgggcaagttgaaaaattcacaaaaatgtggtataatatctttgttcattagagcgataaacttgaatttgagagggaacttagatggtatttgaaaaaattgataaaaatagttggaacagaaaagagtattttgaccactactttgcaagtgtaccttgtacctacagcatgaccgttaaagtggatatcacacaaataaaggaaaagggaatgaaactatatcctgcaatgctttattatattgcaatgattgtaaaccgccattcagagtttaggacggcaatcaatcaagatggtgaattggggatatatgatgagatgataccaagctatacaatatttcacaatgatactgaaacattttccagcctttggactgagtgtaagtctgactttaaatcatttttagcagattatgaaagtgatacgcaacggtatggaaacaatcatagaatggaaggaaagccaaatgctccggaaaacatttttaatgtatctatgataccgtggtcaaccttcgatggctttaatctgaatttgcagaaaggatatgattatttgattcctatttttactatggggaaatattataaagaagataacaaaattatacttcctttggcaattcaagttcatcacgcagtatgtgacggatttcacatttgccgttttgtaaacgaattgcaggaattgataaatagttaacttcaggtttgtctgtaactaaaaacaagtatttaagcaaaaacatcgtagaaatacggtgttttttgttaccctaagtttgttaagggatgcataaactgcatcccttaacttgtttttcgtgtacctattttttgtgaatcgattatgtcttttgcgcattcgtcgacaattgcatatattgataaaaataataatagtgggtataattaagttgttaggaggttagttagagtgaaaccagtaacgttatacgatgtcgcagagtatgccggtgtctcttatcagaccgtttcccgcgtggtgaaccaggccagccacgtttctgcgaaaacgcgggaaaaagtggaagcggcgatggcggagctgaattacattcccaaccgcgtggcacaacaactggcgggcaaacagtcgttgctgattggcgttgccacctccagtctggccctgcacgcgccgtcgcaaattgtcgcggcgattaaatctcgcgccgatcaactgggtgccagcgtggtggtgtcgatggtagaacgaagcggcgtcgaagcctgtaaagcggcggtgcacaatcttctcgcgcaacgcgtcagtgggctgatcattaactatccgctggatgaccaggatgccattgctgtggaagctgcctgcactaatgttccggcgttatttcttgatgtctctgaccagacacccatcaacagtattattttctcccatgaagacggtacgcgactgggcgtggagcatctggtcgcattgggtcaccagcaaatcgcgctgttagcgggcccattaagttctgtctcggcgcgtctgcgtctggctggctggcataaatatctcactcgcaatcaaattcagccgatagcggaacgggaaggcgactggagtgccatgtccggttttcaacaaaccatgcaaatgctgaatgagggcatcgttcccactgcgatgctggttgccaacgatcagatggcgctgggcgcaatgcgcgccattaccgagtccgggctgcgcgttggtgcggacatctcggtagtgggatacgacgataccgaagacagctcatgttatatcccgccgttaaccaccatcaaacaggattttcgcctgctggggcaaaccagcgtggaccgcttgctgcaactctctcagggccaggcggtgaagggcaatcagctgttgcccgtctcactggtgaaaagaaaaaccaccctggcgcccaatacgcaaaccgcctctccccgcgcgttggccgattcattaatgcagctggcacgacaggtttcccgactggaaagcgggcagtgagcgcaacgcaattaatgtaagttagctcactcattaggcaccgggatctcgaccgatgcccttgagagccttcaacccagtcagctccttccggtgggcgcggggcatgactagcatgatcgtgctcctgtcgttgaggacccggctaggctggcggggttgccttactggttagcagaatgaatcaccgatacgcggctcagctagcacccggaattgtgagcggataacaattccttggaattgtgagcggataacaattataattaagttgttaggaggttagaatggaaaactttatcggaagccacatgatttatacgtatgaaaacggatgggaatacgagatttatattaaaaacgaccatacaattgattatagaattcatagcggaatggttgccggacgctgggttcgagatcaggaagtgaatattgtcaaactgacagaaggcgtatataaagtgtcttggacagagccgactggcacggatgtttcattaaactttatgccaaatgaaaaacgcatgcatggcattattttcttcccgaaatgggtgcatgaacatcctgaaattacggtttgctaccaaaatgaccacattgatttgatgaaagaatcccgcgaaaaatatgaaacgtatccaaaatacgttgtacctgaatttgcggaaattacatttctgaaaaatgaaggagtcgacaacgaagaagtgatttcgaaggctccttatgagggaatgacagacgatattcgcgcgggaagattataaagtacgataggaggatcactatgtatgattttgtgattattggcggtggcatcatcggcatgtcgaccgccatgcaactgattgatgtctacccggacgcccgcattgcgttgctggaaaaagagtccggcccggcctgtcaccagacgggccacaacagcggcgtgatccatgccggggtttattacacgcccggtagcctgaaggcacagttttgcctggcgggaaaccgcgccactaaagccttttgcgatcaaaacggcattcgctatgacaactgcggcaagatgctggtcgccacctctgaactcgaaatggaacggatgcgcgcgttgtgggaacgcacggcggcaaacggtatcgagcgcgagtggttaaacgccgatgaactgcgcgagcgcgaaccgaatatcaccgggcttggcggtatttttgtgccgtccagcggcattgtcagctaccgcgaagtaacggcggcgatggcaaaaattttccaggccagaggcggcgagattatctataacgccgaagtcagcggcctcagtgagcataaaaacggcgtggtgatacgtacccgccagggcggcgaatatgaagcatcgacgctgattagctgttccgggctgatggctgaccggctggtgaaaatgctcggactcgaaccgggctttatcatctgcccgttccgtggtgagtatttccgccttgcgccggagcataaccagattgttaaccacctgatttaccccattcccgaccccgcgatgccatttttgggcgtgcatctcacccgaatgatcgatggcagcgtgaccgtcgggccaaacgcggtgctggcttttaaacgcgaaggctaccacaagcgcgacttctcgtttagcgacacgctggaaattttgggctcgtcggggattcgccgggtgctgcaaaaccatctacgctcaggactgggcgagatgaaaaactcgctgtgcaaaagcggctatctgcggctggtgcaaaagtattgtccccggctttcgttaagcgatctccagccctggcccgccggtgtgcgggcgcaggcggtatcgccggacggcaagctgattgacgattttctgtttgtcaccaccccgcgcacgatccacacctgcaatgcgccctccccggcagcgacatcagcaattcctattggtgcgtatattgtcagcaaggtacaaacgctgttggcaagccagagtaaccccggacgcacgctgcgagcggcacgtagtgtggatgccttacacgccgcatttaatcaataaaagtcgactgaggaggatcatcatgacattacaagaggcagttgcaaagtttgttgaagatggcgacgctatctccttcggcggctttacaacaaacaagaaacctatggctgctgttcgcgagattctgcgccagggcaagaaagacttcatcgcatatgcaggtcctgccggatctgactgggatatgctgattggagaggatcgcgtaaaagcgtacatcaactgctatacagctgactccggtgttaccaacgtttcccgtcgtttccgcaaaaaaatcgaggccggcgagctgatctatgaggactactcccaggatgccatcatgtacatgcttcacgctgcttccttaggtcttccattcttaccggtacgttttatgatcggttccggactggttgatgagtggggaatcacaaaggaagtgcgccagactatcgacaagctgccgaacgacaaatttgtgtacatggacaacccatttaacccaggtgagaagaccgtatgccttccagttccgcagctggatacagcaatcatccacgtacagaaggcttcacctgacggaacctgcattctgctcggcgacgagttccacgatgtagatattgctgttgcagctaagaaggttatcgttacatgtgaggagctggtaagcaacgaagtgatccgcagagatccaacccttacaaagattccgtgcttcgcagttgacgctgtctgcgttgctccttacggcgcatacccgacacagtgctacggctactatgattatgacaacagcttcctgaaggcttatggcgcagccagcaagacagaggaggatttcaaggcattcttaaaagagtacgtttacgacgtgaaagacaatgaagagttccttgagaagatcggtgtaaatcgtctccttaagttaaaagtatctgatggctttggatatgcaacagatgtaagcaaggaggattaagtagctgaggaggatctagaatgggtcaaaaatcaaaggcaatgacacttgtaaagaatttattagataatcattataaagaagtaaatatggcaaaagaaagaggggaactagttggttggtcaacatcaatatttcctcaagagattgcagaaacatttggattacatgtattatatcctgaaaatcatgcggcagcagtagcagccaagcacgaatctttgaaagtatgcgaagttgctgaaagtaaaggatattcaatagatatatgttcttatgctagagtaaatttaggatatgtagacttaaagaaaatagaaagtataaacatgcctcaaccagacttcatactttgctgtaataacatatgtaataccgttataaaatggtatgaaaacatagcaaaggaattaaatattcctatgattttaatggataccccttttaacagtgaatacgaaattactcaagaaagaattgattatttcaaaggacagcttcaagaggctataagaaaattagaagaaattacaggtaaaaaatttgaccaaaagcgttttgaagaagttatgaaaatatccacagaagcgggaaatttgtggaaagaatctatgagtctaacaaaggctattccagcaccaatgaatggatttgaaatgtttaattatatggctgttatagtttgtgctcgtgggaaaaaggaaactgtagaaatttttaagactcttatagatgaattgcaagaaagaatagataagggagaaacaagttatagaggagaacaaaaacacagaatcatgtttgaaggtataccatgttggccatatctaagttataaattaagatcattaaatgataaaggaattaatatggtaggtagtgtttatacggatgcgtgggcacttcaatatgaatcaaatgatcttgatggaatggcaaaagcatattgtagcataatgaataatgttaatttagatagacaagtagacatgagagctaaagttattagagattttaagtgtgatggagcaatatatcatatgaatcgaagctgtaagctaatggattttatgcaatatgagttagaaagaagagtagaagcaaaaactaatgtgccatatattggatttgatggggaccaagcagatccaaggaacttcacaaaagctcagtttgaaacaagagtacaaggacttgcagaagttatggaagaaagaaaaaatgtaggaggtgtaaagcatgaatagagatgactgcaggaggatctacaatggctgataagaaagaggtcaaaaagaatgcagcaaaagtgattaatggtatattagctaaatcttatgcagatgcttggaaggcaaaagaagaaggaagaccggttggttggtcaacttccgtatttccacaggaattagtagaagtttttggtttagacgtattatatccagaaaaccaagctgcaggggttgcagctaagaaagaatctttatctctttgtgaagctgcagaaagtgctggatattcaattgatttatgtgcatatgcaagaacaaattttggacttttagaaaagggtggttcagaaaacttaaatatgccaaagcctgactttatatgctgctgtaataatatttgtaatcaagttattaaatggtatgaaaacattgcaaaggaattagatataccattaataatgattgatactacatttaataatgaaaatgaggtaacagaaaatagaattaaataccttagagctcaatttgaagaggctataaaacaacttgagaaaatttctggaaagaaatttgatcccaagaagtttgaagaagttatgaaaatctccgctgaaaacggtaagctttggaaatattctatgagtttaccatcaggatctttcccatcaccaatgaatggatttgacttatttacttatatggctgttatcgtatgctatagaggtaaaatagaaactacagaagcttttaaattattgatttctgaattagaagataatattagaaataaagcaacttcctttagaggagaagagaaatatagaattatgatggaaggaattccatgctggccatatataggctataagatgagaactttagcaggctatggtgttaatatgactggaagcgtttaccctcatgcttgggcattacagtatgaagtaaacgatttagatggaatggctaaagcttacagtactatgtttaataatgttaacttagaaagaatgtgtaaatacagagtagattctttaatagatggaaattgtgatggagcattctatcatatgaatagaagctgtaaattgatgagttttatacaatatgaaatggaaagacaagtttttcaaaaaacaggcataccatatgcgggcttcgatggagaccaagcagatccaagaaactttagtaaggctcagtttgaaacaagactgcaagggctagtagaagttatggaagaaagaaagaaaggaggaaacaaataaagctgagcaggaggatctacatgaaagcattatctattaaaccagaaatctatacctttgatacatgtaaagaatttataaacaaatttaaaataggaaaagaagatttaattattacaagtgagcatacttatgtttcatatttttctaaatataaccttgataccaatgtaatctttattagaaaatacggcactggagagccaagtgatacaatggtagaagcaatttgtaaggatataaaagatattacttataaaagagtaattgctattggcggcggaagtgtccttgacgtttcaaaattgtttgcattaaagaaagtctcgccagtacttgatttatttgatcacaaattagaatttgtaaaagataaggaattgatcctaattccaacaacttgcggaacaggcagtgaagtaactaatatttctattcttgaattgaagtcaagacatacaaaattaggtcttgctatagatgaactatatgcagattttgctgttatgattccagaacttctagagaatttaccctttaaattttttgcaactagttccattgatgccttgattcattccattgaatccagtgtttcaccaaaagctacaagctatacagaaatgttttcctataaagcaatggaaatgatcttaaaaggatatcaggagatttcaaaaaatggcccagacgccaggttttccttgttagataaatttttacttgcaagcaattatgctggaattgcatttggcaatgcagggtgtggtgcagtacatgctatgagttatcctttaggtgctaattaccatgttcctcatggagaagcaaattatcaaatgttcattggagtatttaaaacctattatcgtttaaaaccacaaggtaaaattacaaaactaaataaattcttagcatccattttaaactgcaaagaaaatgaagtttacattaaaatagaagagttattaaatgtattgattcctaaaaaacaattacgtgagtatggggtaaaagaaaaagaattaaaggaatttacacaaagtgttatgactaaacaaggtcgtttaatggcaaataactatacagaattaaatgaacaaactgtatatgaaatatataaatcattatattaagctcagctagcacccggaattgtgagcggataacaattccttggaattgtgagcggataacaattataattaagttgttaggaggttagaatgttgaaggaacaattacctaaaataataactgataaagtccctggaccgaaagcagaagaagtaatacgaagaagagaagatgcagtaccctctgcaattaaatgtgtatatcctgttgtaataaaaagggcagaaggtgcggtgattgaggatgttgatgaaaattattttcttgactggactggtggtgtaggcgtactaaacgttggattttcccatccagaagtggttgaagctgtgaaagaacagtcagagaagtatttccatggtatgtttaatattgttacacacgaaggatatgttaagctggcagagaaaatgaactccattgttcctgtaaagggaaataagaaaaaaacgtttttcgcaaatagtggagcagaggctgatgaaaatgcagtaaaaatagcaaaagcttttacaaatagacccaatatagttgtattttcaggggcatttcatggacgtacagttatgaccatggcaatgacatcgaaaaaatcttatgcctatggaatgggaccttttccagatggtgtataccgtgcagaatttccgtatttatatagaagtcctgaaggaatgccagagagtgaaaccattaattattatatagaaagtattaaaaaagtatttgatcaagcttcaccaccggagtacgtagcagctatagtagtagaaccacttcagggtgaaggcggatttattccagctcccattgaatgggttaaagcagtaagaactatttgtgataaatatggtatattgcttgttgcagatgaggtacaatgtgggttctgccgtacaggtaaaatgtttgcttctgaatattggaaggaagcaggagcagctccagatataatagcaactgcaaaatctattgcagctggtatgccattaagcgcaataacagcaagggaagagattatggaggcagtaagacccggaacaattggaggaaccttctgtggaaatgcagtagcatgtgcagcagcattaaaagtgatagaaattatggaaagagatcatttggctgaccgttctatggaaataggtaagaaagtaatgaaacgctatatggaatggaaagaaaaatatgagattgttggagatgtaagaggactcggcggaatggttggaatagaatttgtaaaaaacaaagaaaagaaagatccaaatcctgaaattgtatcagcagttattcaagaagcagcccaaaatggacttatgattgagaactcgggtgtttatggaaatgttatccgctttttagcaccacttgtaattacagataagcagcttgaagcaggattagatatttttgaaaaagcaatttctaagtgtatgcaaaagtaagttgaggaggtagataatgagcggcccgaccaccgataccccggcggcgattcagatttgccgcattatgcgcccggatgatgcgaacgtggcgggcaacgtgcatggcggcaccattctgaaaatgattgaagaagcgggcgcgattattagcacccgccattgcaacagccagaacggcgaacgctgcgtggcggcgctggcgcgcgtggaacgcaccgattttctgagcccgatgtgcattggcgaagtggcgcatgtgagcgcggaaattacctataccagcaaacatagcgtggaagtgcaggtgcatgtgatgagcgaaaacattctgaccggcaccaaaaaactgaccaacaaagcgaccctgtggtatgtgccgctgagcctgaaaaacgtggataaagtgctggaagtgccgccgattgtgtatctgcgccaggaacaggaagaagaaggccgcaaacgctatgaagcgcagaaactggaacgcatggaaaccaaatggcgcaacggcgatattgtgcagccggtgctgaacccggaaccgaacaccgtgagctatagccagagcagcctgattcatctggtgggcccgagcgattgcaccctgcatggctttgtgcatggcggcgtgaccatgaaactgatggatgaagtggcgggcattgtggcggcgcgccattgcaaaaccaacattgtgaccgcgagcgtggatgcgattaactttcatgataaaattcgcaaaggctgcgtgattaccattagcggccgcatgacctttaccagcaacaaaagcatggaaattgaagtgctggtggatgcggatccggtggtggataacagccagaaacgctatcgcgcggcgagcgcgttttttacctatgtgagcctgaaccaggaaggcaaaccgatgccggtgccgcagctggtgccggaaaccgaagatgaaaaaaaacgctttgaagaaggcaaaggccgctatctgcagatgaaagcgaaacgccagggccataccgaaccgcagccgtagacgataggaggacgtacatgattgtaaaaccaatggttaggaacaatatttgtctaaacgctcatccgcaaggatgcaaaaaaggcgttgaggatcaaatagagtacacaaaaaagagaattaccgctgaggtaaaagccggagcaaaagcccctaaaaacgtgctggttctcggctgctcgaacggttacggacttgcaagccggataacggcagcattcggctatggggccgccactatcggcgtttcctttgaaaaagccggaagcgaaacaaagtacggcacacccggctggtacaacaacctggcctttgacgaggctgccaaaagggaaggcctttattccgtaactatagacggagacgccttttccgatgaaatcaaggcacaagtaatcgaagaagccaaaaagaaaggaattaaattcgatcttatagtttacagcttggcaagccctgtaagaaccgatcccgacacaggcataatgcacaagtccgtcttaaaacccttcggtaaaacatttacaggcaagacagtcgatccctttacgggagaactaaaagaaatctccgccgaacctgcaaacgatgaagaagccgctgcaaccgttaaggttatgggaggagaagactgggaacgctggataaagcagctttcaaaagaaggtcttttagaagaaggctgcattaccctagcctattcctatatcggccctgaggccactcaagccctctaccgaaagggcaccataggaaaggcaaaagaacaccttgaagcaactgcccaccgcctaaacaaagaaaacccgtcaatacgggccttcgtttcggtgaacaagggcttggtaacaagggcaagtgcggtaatccccgtaattcccctatacctcgcttccttgtttaaggttatgaaagaaaaaggaaaccacgagggctgtatcgagcagattacccgcctttatgccgaaagactctaccgtaaagacggcaccatccccgtcgatgaagaaaacagaatccgtatcgacgactgggagcttgaagaagacgttcaaaaggcggtttcggctttaatggaaaaagtaaccggcgaaaatgccgaaagcctaaccgaccttgcaggctaccgccacgactttttagcctcaaacggctttgatgtagaaggcatcaactacgaagccgaggtagaaaggttcgacaggatttaaaacacaggaggacgataatgacgcgtgaagtggtagtggtaagcggtgtccgtaccgcgatcgggacctttggcggcagcctgaaggatgtggcaccggcggagctgggcgcactggtggtgcgcgaggcgctggcgcgcgcgcaggtgtcgggcgacgatgtcggccacgtggtattcggcaacgtgatccagaccgagccgcgcgacatgtatctgggccgcgtcgcggccgtcaacggcggggtgacgatcaacgcccccgcgctgaccgtgaaccgcctgtgcggctcgggcctgcaggccattgtcagcgccgcgcagaccatcctgctgggcgataccgacgtcgccatcggcggcggcgcggaaagcatgagccgcgcaccgtacctggcgccggcagcgcgctggggcgcacgcatgggcgacgccggcctggtcgacatgatgctgggtgcgctgcacgatcccttccatcgcatccacatgggcgtgaccgccgagaatgtcgccaaggaatacgacatctcgcgcgcgcagcaggacgaggccgcgctggaatcgcaccgccgcgcttcggcagcgatcaaggccggctacttcaaggaccagatcgtcccggtggtgagcaagggccgcaagggcgacgtgaccttcgacaccgacgagcacgtgcgccatgacgccaccatcgacgacatgaccaagctcaggccggtcttcgtcaaggaaaacggcacggtcacggccggcaatgcctcgggcctgaacgacgccgccgccgcggtggtgatgatggagcgcgccgaagccgagcgccgcggcctgaagccgctggcccgcctggtgtcgtacggccatgccggcgtggacccgaaggccatgggcatcggcccggtgccggcgacgaagatcgcgctggagcgcgccggcctgcaggtgtcggacctggacgtgatcgaagccaacgaagcctttgccgcacaggcgtgcgccgtgaccaaggcgctcggtctggacccggccaaggttaacccgaacggctcgggcatctcgctgggccacccgatcggcgccaccggtgccctgatcacggtgaaggcgctgcatgagctgaaccgcgtgcagggccgctacgcgctggtgacgatgtgcatcggcggcgggcagggcattgccgccatcttcgagcgtatctgaacagaggaggacgatacatgagcatcaggacagtgggcatcgtcggtgccggcaccatgggcaatggcatcgcccaggcctgcgcagtggtaggtctcaacgtggtgatggtcgacatcagcgatgccgccgtgcagaagggtgtcgccaccgtggcaagcagcctggaccgtctgatcaagaaggaaaagctgaccgaggccgacaaggccagcgcgctggcgcgcatcaagggcagcacctcgtatgacgatctcaaggccaccgatatcgtgatcgaggccgccaccgagaactacgacctgaaggtcaagatcctcaagcagatcgacggcatcgtcggcgagaacgtgatcatcgcgtccaacacctcgtcgatctcgatcaccaagctggctgccgtgacctcgcgcgccgaccgctttatcggcatgcacttcttcaacccggtgccggtgatggcgctggtggaactgatccgcggcctgcagaccagcgacaccacccacgccgccgtcgaggccctgtcgaagcagctcggcaaatacccgatcacggtcaagaacagcccgggcttcgtcgtcaaccgcatcctgtgcccgatgatcaacgaggccttctgcgtgctgggcgaaggcctggcctcgccggaagagatcgacgaaggcatgaagctgggctgcaaccacccgatcgggccgctggcgctggctgacatgatcggcctggacaccatgctggccgtgatggaagtgctgtacacggagtttgccgatccgaagtaccgcccggcgatgctgatgcgcgagatggtcgctgccggctacctgggccgcaagactggccgcggcgtgtacgtctatagcaagtaaaaaggagtgtatataaatggatggcaaagagtatgttcaaaaagttttaagtactgtacaaaaaagaaatttaggtgaagaagaatttcttgatgcggtaaaagaagttttaacttctttagtacctgtatttgatagaagacctgattttattaaagcaggattacttgaaagattaactgaaccagaaagagctataagttttagagtcccatgggttgatgataatggagaggttcaagtaaacagaggttttagaattcaatttaattcggctataggaccgtataagggtgggttaagatttcatccatctgtaaatcaaagtatcgtaaaatttttaggatttgagcaaatatttaagaactccttaacagggttacctatcggaggagcaaaaggcggttcagattttgatccaaaaggcaaatctgataacgaagttatgagattttgtcaagcttttatgtctgagctgtacaagtacataggttctaatagagatgtacctgcaggagatataggtgtcggtggaagagaaattggatatctatatggctattataataaacttaaaggtgtaagtgaacagggtactttgacaggcaagggactgacttatggaggaagtcttgccagaacagaagcaacaggatatggattagtttattttactgaagaaatgctaaaggatcataatttgagtttcaaagataaaaaagtagtagtttcaggttcgggaaatgtggctatttatgctattgaaaaagcaactgaacttggagctaaagttattacttgttctgattctaatggatatattttagatgaaaatggaattaatctagatgtagtaaaagaaattaaagaagttagaaggggaagaataaaagaatatctaaaaagtgtgcctactgctaagtatgtaccagattttagagaaatttggaatgttaagtgtgacatagctcttccttgtgcaactcaaggtgaaataaatgagaaatctgctaaggctcttgtagaaaatggtgttatagctgtatcagaaggagcaaatatgccgtcaactttagatgcaataaatgtatttttaagtaataagattctttttggaccttctaaggcagctaatgcaggaggagttgcatgttctgctattgaaatgtctcagaatagtataaggtattcatggacatttgaagaggtaaataataagatcaaaaatataatgattaatatttataataattctaaaaacgcggcaaaagaatatggaaatgaaggaaatatagttgtaggagccaatattgctggatttttaaaagttgctgaggctatgatggcccaaggcataatttaaaagacattcgggaggaagaatttaaatgggtttctactctatgcctagatatttccaaaatatgcctcaggtgggcaaacccctgaaaaaggcggatgccgccaatgaagaacagctgaaaaagatcgaagaagagatccatcagctgatcaaagaggctcaggaagccggcaaggcagatgctgatgtaaacaagagaggggaactgaccgctctccagagaattgaaaaactggtggaaccgggctcctggagacccctgaacaccctgttcaaccctcagggcaacaagaacggctccgtggccatcgtcaagggcctgggccgtgtaaacggcaaatggtgcgtggtcgtggcttccgacaacaagaagctggccggtgcctgggtgccaggccaggctgaatgcctgctgcgggcttccgataccgccaagaccctgcacgtgcctctggtgtatgtgctgaactgctccggcgttaagttcgacgaacaggaaaaggtataccccaaccgtcgtggcggcggtacgcctttcttccggaacgctgaactgaaccagctgggcattcccgtcatcgttggcatctacggcaccaaccctgccggcggcggctatcattccatcagccccacggtgatcattgcccatgaaaaagccaacatggctgtgggcggcgccggcattatgggcggcatgaaccccaaaggtcatgtggacctggaatatgccaacgaaatcgccgacatggtggaccgtaccggcaagaccgaacctccgggagctgtcgacatccactacaccgaaaccggtttcatgcgtgaagtctatgcttccgaagaaggcgttctggaagggatcaagaagtatgtaggcatgctgccgaaatacgatcctgaattcttccgggtggacgatccgaaagcaccggcattcccggctgacgacctgtacagcatggttcctctgaacgacaaacgggcttatgacatctacaatgtaattgcccgcctgttcgacaacagcgaactccatgaatacaaaaaaggctacggccctgaaatggtcaccggtctggccaaagtcaacggcctgctggtgggcgttgtggccaacgtccagggtctcctgatgaactaccctgaatacaaggctgcaggctccgtagggatcggcggcaaactgtaccgccagggtctggtgaaaatgaatgaattcgtcaccctgtgcgccagagaccgtctgcccatcgtctggatccaggataccaccgggatcgatgtgggcaacgatgcggaaaaggctgaactgctgggtctgggccagtccctgatctactccatccagacttcccacatccctcaattcgaaattaccctgagaaaaggcacggctgctgcccactacgtactgggcgggcctcagggcaatgacaccaacgccttctccatcggtaccgctgctacggaaatcgccgttatgaacggtgaaaccgctgccaccgccatgtactcccggagactggccaaagaccggaaagccggcaaggatctgcagccgaccatcgacaagatgaacaacctgatccaggctttctacaccaaatctcgtccgaaagtctgtgctgaactgggtctggtggatgaaatcgtggacatgaacaagatccgcgggtatgtggaagccttcacggaagctgcttatcagaatccggaaagcatctgcccgttccatcagatgattctgcctcgtgccatcagagagtttgagactttcgtaaagaaataatccttacaaggaggatctacaatgaccgacaatccttggctgattatgatgatcaacatgaccatcgtattcggtgtgctgattgtgctgggaatcctgatggtgctgatccatgctgtcgatcccaccaagaaagttcagggaaaaaaaaagcctgtagttgctaagccggcgccttccgctgctgccagcaaacggcaggaagaggaaaaagtggctgccatggcagctgtcctggccctggtccaggatgaagacgatatgattgcagctgccctgagtgctgccatcgccgaacacaaaagaaaaatggagccgatgaatctgccccatcattctttctgatgaactgttgagggacggttcattatccacaaaatcaaacaacttgaaaactgtttaggagggattctcatgagaaaattcaatgttaacgttaacggtactgtttacactgtagaagttgaagaagtcggcggcgctgtaactgcagctcctgctgctcctgccgctcctgccgctgctcctgctgccgctcctgtagctgctgctcctgctgctgctcccgctccggctcctgccgctgctcctgctgctgctcccgctccggctgccaaaccggccgctgctgctcctgccggctccgtaaccgtatccgctcccatgcccggcaagatcctgtccgttaacgtaaaacccggcgacaaagtggaagccggcgatgttctgctgatcctggaagctatgaagatgcagaacgaaatcatggctcctgaagacggcacggtttccgaagtccgcgtaaacgctggcgataccgtagccaccggcgacgtaatggttattctctaatcaacgtctccgaacataaaggaggattttagaacatggatgcttttgtggtagccctgacctctgtcatccaggacagtgggtttgtggcttttacctggggcaatgccgtaatgatgctggtcgggtgcatcctgctgtacctggccatcgtcaaaggctttgaacccctgctgctgagcccgatcgccttcgggtgcattctggccaacgtaccccggaccgggttcgaaaccgaccccggcgtcatgcagctgatcctgggcgggatcaaatacgaaatcttccctccgctgattttcatgggcgtaggggccatgaccgactttggtccgctgattgccaaccccaagaccctgctgctgggcgctgctgcccagatcggcgtgttcgtggctctgctgggggccatgctcctgggcttcaatgtgaaggaagcttccgccatcgggatcatcggtggtgctgacggcccgacttccatttacctggcttccaagatggctccccatctgctgggcgccatcgccgtggccgcttattcctacatgtccctggtgcccctgatccagccgcctgtgatgaaactgttcacctccaaggaagaacggaagatcaaaatggcccagctgcgtacggtgacccactttgaaaaagtggtgttccccattgtcaccaccattttcatttccctgctgctgccttccgtatgctctttgatcgggatgctgatgctggggaacctgttcaccgaatccggctgtatggaccgtctgtctgacacggcacagaatgccctgatgaacagcgtgaccatcatgctggccaccggtaccggcctgaccatgaaggccgaaagcttcctgaccttgcagaccatcgaaatcatctgcctgggtctggttgcctttatcggcggcaccgccggcggtgtgctgttcggcaagctgatgagcaagctggacggcggcaagaccaacccgctgattggttctgccggtgtatccgcagtgcctatggctgcccgtgtgtcccaggttgtgggacagcaggctgaccctggcaacttcctgctgatgcacgccatgggccccaatgtggccggggttatcggtacggctgttgcagctggtaccatgctggccatggtgggcggcaaataaagtcaaggaggagcataatggagtgggaagagatatataaagagaaactggtaactgcagaaaaagctgtttcaaaaatagaaaaccatagcagggtagtttttgcacatgcagtaggagaacccgtagatttagtaaatgcactagttaaaaataaggataattatataggactagaaatagttcacatggtagctatgggcaaaggtgaatatacaaaagagggtatgcaaagacattttagacataatgctttatttgtaggcggatgtactagagatgcagtaaattcaggaagagcagattatacaccttgttttttctatgaagtgccaagtttgtttaaagaaaaacgtttgcctgtagatgtagcacttattcaggtaagtgagccagataaatatggctactgcagttttggagtttccaatgactataccaagccagcagcagaaagtgctaagcttgtaattgcagaagtgaataaaaacatgccaagaactcttggagattcttttatacatgtatcagatattgattatatagtggaagcttcacacccattgttagaattgcagcctcctaaattgggagatgtagaaaaagccataggagaaaactgtgcatctttaattgaagatggagctactcttcagcttggaataggtgctataccagatgcggtacttttattcttaaagaacaaaaagaatttaggaatacattctgagatgatatcagatggtgtgatggaactggtgaaggcaggggttatcaataacaagaaaaagaccctccatccaggcaaaatagttgtaacatttttaatgggaacaaaaaaattatatgattttgtaaacaataatccaatggtagaaacttattctgtagattatgtaaataatccactggtaattatgaaaaatgacaatatggtttcaataaattcttgtgttcaagtagacttaatgggacaagtatgttctgaaagtataggattgaaacagataagtggagtgggaggccaggtagattttattagaggagctaatctatcaaagggtggaaaggctattatagctataccttccacagctggaaaaggaaaagtttcaagaataactccacttctagatactggtgctgcagttacaacttctagaaatgaagtagattatgtagttactgaatatggtgttgctcatcttaagggcaaaactttaagaaatagggcaagagctctaataaatatcgctcatccaaaattcagagaatcattaatgaatgaatttaaaaagagattttagagattaaggaggactacgaatgtctttaatgactggggaagaatatgtagaaagtttacgtaaattaaaattaaacgtttattatctgggagagaaaatagataatccagtggataaccctgtacttcgtccatctttaaattctgttaagatgacttatgacttggcccaagaagcagaatatgaggatttaatgacaacaacatcaaatataacaggtgaaaaaataaatagatttacaaatttacatcaaagcagtgaagatttggtaaaaaaagttaaaatgcagagattgtgcggacaaaaaactgcagcctgtttccaaagatgcgttggtatggactcatttaatgcagtgtacagtactacttttgaaatagataaggaatataatacaaattattttgaaaatttcaagaaatttttaacttatgttcaaaagaacgatttaacagtagatggagctatgacagatccaaaaggagacagaggattgtcaccaagcaaacaggctgatccagatttatatttaagagttgtagaaagaagagaagacggtgtagttgtaagaggagcaaaggctcaccagacaggtatatgtaattctcatgaagtattggttatgccaactattgctatgagaccggatgataaagattatgcaatagctttttctgttcctacagatgcagaaggaataactatgataattggaagacagtcctgtgatactagaaaaatggaaaaagatgcggacatagatgttggtaataaagaatttggcggagtagaagcattagtagtatttgacgatgtatttgttccaaatgacaggatattcttaaatggtgaaactgaatatgcaggaatgttagtagagagatttgcaggatatcatagacaaagttatggtggatgcaaagtaggagtgggagatgtattgataggcgctgctgcagtggctgcagactataatggagctgcaaaggcatctcacataaaggataaattaatagaaatgatgcatttaaatgaaactctttacgcttgcggaattgcgtgctcagcagaaggacatgcaacaaaagctggaaattaccaaatagacttgcttcttgcaaatgtatgtaagcaaaatataacaagattcccttatgaaattgtgagattagcagaagatatagcaggaggattaatggttactatgccttctgaaaaggattataagagtccagaggttggaaaatatgtagagaagtacttggtgggagttgcatccgtacctgttgaagacagaatgaagatattaagattattagaaaatatatgtcttggaacggctgcagtaggatatagaactgaatccatgcatggagcaggttcacctcaagcacagagaataatgatatcaagacagggaaacctagcacataagaagaaacttgcaaagaagatagctagaatagaagattaagctatcataaaaataagaagcctgcatttgcaggcttcttatttttat

SEQ ID NO: 40 - DNA, 19722 bp, artificial sequence
  plasmid SG557
aaggccagcaaaaggccaggaaccgtaaaaaggccgcgttgctggcgtttttccataggctccgcccccctgacgagcatcacaaaaatcgacgctcaagtcagaggtggcgaaacccgacaggactataaagataccaggcgtttccccctggaagctccctcgtgcgctctcctgttccgaccctgccgcttaccggatacctgtccgcctttctcccttcgggaagcgtggcgctttctcatagctcacgctgtaggtatctcagttcggtgtaggtcgttcgctccaagctgggctgtgtgcacgaaccccccgttcagcccgaccgctgcgccttatccggtaactatcgtcttgagtccaacccggtaagacacgacttatcgccactggcagcagccactggtaacaggattagcagagcgaggtatgtaggcggtgctacagagttcttgaagtggtggcctaactacggctacactagaagaacagtatttggtatctgcgctctgctgaagccagttaccttcggaaaaagagttggtagctcttgatccggcaaacaaaccaccgctggtagcggtggtttttttgtttgcaagcagcagattacgcgcagaaaaaaaggatctcaagaagatcctttgatcttttctacggggtctgacgctcagtggaacgaaaactcacgttaagggattttggtcatgagattatcaaaaaggatcttcacctagatccttttaaattaaaaatgaagttttaaatcaatctaaagtatatatgagtaaacttggtctgacagctcttcctttttcaatattattgaagcatttatcagggttattgtctcatgagcggatacatatttgaatgtatttagaaaaataaacaaataggggttccgcgcacatttccccgaaaagtgccacctgacggtcctgcatcagctcttatatattaagctaccaacttagtatataagccaaaacttaaatgtgctaccaacacatcaagccgttagagaactctatctatagcaatatttcaaatgtaccgacatacaagagaaacattaactatatatattcaatttatgagattatcttaacagatataaatgtaaattgcaataagtaagatttagaagtttatagcctttgtgtattggaagcagtacgcaaaggcttttttatttgataaaaattagaagtatatttattttttcataattaatttatgaaaatgaaagggggtgagcaaagtgacagaggaaagcagtatcttatcaaataacaaggtattagcaatatcattattgactttagcagtaaacattatgacttttatagtgcttgtagctaagtagtacgaaagggggagctttaaaaagctccttggaatacatagaattcataaattaatttatgaaaagaagggcgtatatgaaaacttgtaaaaattgcaaagagtttattaaagatactgaaatatgcaaaatacattcgttgatgattcatgataaaacagtagcaacctattgcagtaaatacaatgagtcaagatgtttacataaagggaaagtccaatgtattaattgttcaaagatgaaccgatatggatggtgtgccataaaaatgagatgttttacagaggaagaacagaaaaaagaacgtacatgcattaaatattatgcaaggagctttaaaaaagctcatgtaaagaagagtaaaaagaaaaaataatttatttattaatttaatattgagagtgccgacacagtatgcactaaaaaatatatctgtggtgtagtgagccgatacaaaaggatagtcactcgcattttcataatacatcttatgttatgattatgtgtcggtgggacttcacgacgaaaacccacaataaaaaaagagttcggggtagggttaagcatagttgaggcaactaaacaatcaagctaggatatgcagtagcagaccgtaaggtcgttgtttaggtgtgttgtaatacatacgctattaagatgtaaaaatacggataccaatgaagggaaaagtataatttttggatgtagtttgtttgttcatctatgggcaaactacgtccaaagccgtttccaaatctgctaaaaagtatatcctttctaaaatcaaagtcaagtatgaaatcataaataaagtttaattttgaagttattatgatattatgtttttctattaaaataaattaagtatatagaatagtttaataatagtatatacttaatgtgataagtgtctgacagtgtcacagaaaggatgattgttatggattataagcggccggccagtgggcaagttgaaaaattcacaaaaatgtggtataatatctttgttcattagagcgataaacttgaatttgagagggaacttagatggtatttgaaaaaattgataaaaatagttggaacagaaaagagtattttgaccactactttgcaagtgtaccttgtacctacagcatgaccgttaaagtggatatcacacaaataaaggaaaagggaatgaaactatatcctgcaatgctttattatattgcaatgattgtaaaccgccattcagagtttaggacggcaatcaatcaagatggtgaattggggatatatgatgagatgataccaagctatacaatatttcacaatgatactgaaacattttccagcctttggactgagtgtaagtctgactttaaatcatttttagcagattatgaaagtgatacgcaacggtatggaaacaatcatagaatggaaggaaagccaaatgctccggaaaacatttttaatgtatctatgataccgtggtcaaccttcgatggctttaatctgaatttgcagaaaggatatgattatttgattcctatttttactatggggaaatattataaagaagataacaaaattatacttcctttggcaattcaagttcatcacgcagtatgtgacggatttcacatttgccgttttgtaaacgaattgcaggaattgataaatagttaacttcaggtttgtctgtaactaaaaacaagtatttaagcaaaaacatcgtagaaatacggtgttttttgttaccctaagtttgttaagggatgcataaactgcatcccttaacttgtttttcgtgtacctattttttgtgaatcgattatgtcttttgcgcattcgtcgacaattgcatatattgataaaaataataatagtgggtataattaagttgttaggaggttagttagagtgaaaccagtaacgttatacgatgtcgcagagtatgccggtgtctcttatcagaccgtttcccgcgtggtgaaccaggccagccacgtttctgcgaaaacgcgggaaaaagtggaagcggcgatggcggagctgaattacattcccaaccgcgtggcacaacaactggcgggcaaacagtcgttgctgattggcgttgccacctccagtctggccctgcacgcgccgtcgcaaattgtcgcggcgattaaatctcgcgccgatcaactgggtgccagcgtggtggtgtcgatggtagaacgaagcggcgtcgaagcctgtaaagcggcggtgcacaatcttctcgcgcaacgcgtcagtgggctgatcattaactatccgctggatgaccaggatgccattgctgtggaagctgcctgcactaatgttccggcgttatttcttgatgtctctgaccagacacccatcaacagtattattttctcccatgaagacggtacgcgactgggcgtggagcatctggtcgcattgggtcaccagcaaatcgcgctgttagcgggcccattaagttctgtctcggcgcgtctgcgtctggctggctggcataaatatctcactcgcaatcaaattcagccgatagcggaacgggaaggcgactggagtgccatgtccggttttcaacaaaccatgcaaatgctgaatgagggcatcgttcccactgcgatgctggttgccaacgatcagatggcgctgggcgcaatgcgcgccattaccgagtccgggctgcgcgttggtgcggacatctcggtagtgggatacgacgataccgaagacagctcatgttatatcccgccgttaaccaccatcaaacaggattttcgcctgctggggcaaaccagcgtggaccgcttgctgcaactctctcagggccaggcggtgaagggcaatcagctgttgcccgtctcactggtgaaaagaaaaaccaccctggcgcccaatacgcaaaccgcctctccccgcgcgttggccgattcattaatgcagctggcacgacaggtttcccgactggaaagcgggcagtgagcgcaacgcaattaatgtaagttagctcactcattaggcaccgggatctcgaccgatgcccttgagagccttcaacccagtcagctccttccggtgggcgcggggcatgactagcatgatcgtgctcctgtcgttgaggacccggctaggctggcggggttgccttactggttagcagaatgaatcaccgatacgcggctcagctagcacccggaattgtgagcggataacaattccttggaattgtgagcggataacaattataattaagttgttaggaggttagaatgagtctgaatttccttgattttgaacagccgattgcagagctggaagcgaaaatcgattctctgactgcggttagccgtcaggatgagaaactggatattaacatcgatgaagaagtgcatcgtctgcgtgaaaaaagcgtagaactgacacgtaaaatcttcgccgatctcggtgcatggcagattgcgcaactggcacgccatccacagcgtccttataccctggattacgttcgcctggcatttgatgaatttgacgaactggctggcgaccgcgcgtatgcagacgataaagctatcgtcggtggtatcgcccgtctcgatggtcgtccggtgatgatcattggtcatcaaaaaggtcgtgaaaccaaagaaaaaattcgccgtaactttggtatgccagcgccagaaggttaccgcaaagcactgcgtctgatgcaaatggctgaacgctttaagatgccaatcatcacctttatcgacaccccgggggcttatccgggcgtgggcgcagaagagcgcggtcagtctgaagccattgcacgcaacctgcgtgaaatgtctcgccttagcgtaccgactatttgtaccgttatcggtgaaggtggttctggcggcgcgctggcgattggcgtgggcgataaagtgaatatgctgcaatacagcacctattccgttatctcgccggaaggttgtgcgtccattctgtggaagagcgctgataaagcgccgctggcggctgaagcgatgggtatcatcgctccgcgtctgaaagaactaaaactgatcgactccatcatcccagaaccgctgggtggtgctcaccgtaacccggaagcgatggcggcatcgttgaaagcgcaactgttggcggatctggccgatctcgacgtgttaagcactgaagatttaaaaaatcgtcgttatcagcgcctgatgagctacggttacgcgtaataaggaggaacccactcatggatattcgtaagattaaaaaactgatcgagctggttgaagaatcaggcatctccgaactggaaatttctgaaggcgaagagtcagtacgcattagccgtgcagctcctgccgcaagtttccctgtgatgcaacaagcttacgctgcaccaatgatgcagcagccagctcaatctaacgcagccgctccggcgaccgttccttccatggaagcgccagcagcagcggaaatcagtggtcacatcgtacgttccccgatggttggtactttctaccgcaccccaagcccggacgcaaaagcgttcatcgaagtgggtcagaaagtcaacgtgggcgataccctgtgcatcgttgaagccatgaaaatgatgaaccagatcgaagcggacaaatccggtaccgtgaaagcaattctggtcgaaagtggacaaccggtagaatttgacgagccgctggtcgtcatcgagtaacgaggcgaacatgctggataaaattgttattgccaaccgcggcgagattgcattgcgtattcttcgtgcctgtaaagaactgggcatcaagactgtcgctgtgcactccagcgcggatcgcgatctaaaacacgtattactggcagatgaaacggtctgtattggccctgctccgtcagtaaaaagttatctgaacatcccggcaatcatcagcgccgctgaaatcaccggcgcagtagcaatccatccgggttacggcttcctctccgagaacgccaactttgccgagcaggttgaacgctccggctttatcttcattggcccgaaagcagaaaccattcgcctgatgggcgacaaagtatccgcaatcgcggcgatgaaaaaagcgggcgtcccttgcgtaccgggttctgacggcccgctgggcgacgatatggataaaaaccgtgccattgctaaacgcattggttatccggtgattatcaaagcctccggcggcggcggcggtcgcggtatgcgcgtagtgcgcggcgacgctgaactggcacaatccatctccatgacccgtgcggaagcgaaagctgctttcagcaacgatatggtttacatggagaaatacctggaaaatcctcgccacgtcgagattcaggtactggctgacggtcagggcaacgctatctatctggcggaacgtgactgctccatgcaacgccgccaccagaaagtggtcgaagaagcgccagcaccgggcattaccccggaactgcgtcgctacatcggcgaacgttgcgctaaagcgtgtgttgatatcggctatcgcggtgcaggtactttcgagttcctgttcgaaaacggcgagttctatttcatcgaaatgaacacccgtattcaggtagaacacccggttacagaaatgatcaccggcgttgacctgatcaaagaacagctgcgtatcgctgccggtcaaccgctgtcgatcaagcaagaagaagttcacgttcgcggccatgcggtggaatgtcgtatcaacgccgaagatccgaacaccttcctgccaagtccgggcaaaatcacccgtttccacgcacctggcggttttggcgtacgttgggagtctcatatctacgcgggctacaccgtaccgccgtactatgactcaatgatcggtaagctgatttgctacggtgaaaaccgtgacgtggcgattgcccgcatgaagaatgcgctgcaggagctgatcatcgacggtatcaaaaccaacgttgatctgcagatccgcatcatgaatgacgagaacttccagcatggtggcactaacatccactatctggagaaaaaactcggtcttcaggaaaaataatataggaggatataacatgagctggattgaacgaattaaaagcaacattactcccacccgcaaggcgagcattcctgaaggggtgtggactaagtgtgatagctgcggtcaggttttataccgcgctgagctggaacgtaatcttgaggtctgtccgaagtgtgaccatcacatgcgtatgacagcgcgtaatcgcctgcatagcctgttagatgaaggaagccttgtggagctgggtagcgagcttgagccgaaagatgtgctgaagtttcgtgactccaagaagtataaagaccgtctggcatctgcgcagaaagaaaccggcgaaaaagatgcgctggtggtgatgaaaggcactctgtatggaatgccggttgtcgctgcggcattcgagttcgcctttatgggcggttcaatggggtctgttgtgggtgcacgtttcgtgcgtgccgttgagcaggcgctggaagataactgcccgctgatctgcttctccgcctctggtggcgcacgtatgcaggaagcactgatgtcgctgatgcagatggcgaaaacctctgcggcactggcaaaaatgcaggagcgcggcttgccgtacatctccgtgctgaccgacccgacgatgggcggtgtttctgcaagtttcgccatgctgggcgatctcaacatcgctgaaccgaaagcgttaatcggctttgccggtccgcgtgttatcgaacagaccgttcgcgaaaaactgccgcctggattccagcgcagtgaattcctgatcgagaaaggcgcgatcgacatgatcgtccgtcgtccggaaatgcgcctgaaactggcgagtattctggcgaagttgatgaatctgccagcgccgaatcctgaagcgccgcgtgaaggcgtagtggtacccccggtaccggatcaggaacctgaggcctgagactaggaggatcttaaaaaggagtgtatataaatgagtttaacacaaggcatgaaagcaaaacagttgttagcctactttcagggaaaggctgatcaagatgcaagagaagcaaaagcaagaggcgaacttgtttgttggtctgcttccgtagctccccctgaattctgcgtgacaatgggtatcgcaatgatttatcctgagacccacgcagcaggtattggcgcaagaaaaggcgcaatggacatgttggaagttgctgatagaaaaggctacaatgttgactgctgttcttacggcagagtaaacatgggttacatggaatgcctgaaggaagctgcaattacaggtgtaaaacctgaggttttggtcaactctcctgcagcagacgttcctctgcctgacttggtaatcacatgtaataacatttgtaatacattgttgaaatggtatgaaaaccttgcggcagaattagacattccttgcatcgttatcgacgttcctttcaaccacacaatgcctattcctgaatatgcaaaagcttacattgcagatcagtttagaaatgcaatttctcagctggaagtaatctgtggtagaccttttgactggaagaagtttaaagaagttaaagatcagacacagcgttctgtataccactggaacagaattgcagaaatggctaaatataaaccatcacctttgaatggcttcgacttgtttaattacatggcattgatcgttgcttgccgttctttggattatgctgaaattacattcaaagcatttgctgatgaattagaagaaaacttgaaggctggtatctatgcattcaagggcgctgaaaagactcgtttccaatgggaaggtattgctgtatggcctcacttgggtcacacattcaagtccatgaagaacctcaattctatcatgacaggtacagcttaccctgcactttgggatttgcactatgatgcaaacgatgaatctatgcactctatggcagaagcttatacaagaatttatattaacacatgcttacagaacaaagttgaagttttgttgggcatcatggaaaaaggccaggttgacggtacagtttatcacttgaacagaagctgtaagttgatgagcttcctgaacgttgaaacagctgaaattatcaaagaaaagaatggtttgccttatgtaagcatcgatggtgaccagacagatcctcgcgtattctctcccgcacagtttgatacacgtgttcaggcactggttgaaatgatggaagccaacatggctgcagcagaataaatcacaaggaggatcacatgagtagagtagaagctattttatcccaattaaaagacgttgccgcaaatcctaaaaaggcaatggatgattataaggcggaaacaggtaagggtgcagtaggtattatgcctatttactcccctgaagaaatggtacacgcagctggttatttgcctatgggtatctggggtgcacaaggtaaaacaatttccaaggctcgtacatatcttcctgcatttgcttgttcagttatgcagcaggttatggaactgcagtgtgaaggcgcttatgatgacctttctgctgtaattttctctgtaccttgtgatacattaaagtgcttaagccagaaatggaaaggcacatcccctgtaattgtatttacacatcctcagaacagaggcttggaagctgcaaatcagttcttagtaacagagtatgaattggtaaaggctcagcttgaatcagttttgggtgtaaaaatttcaaacgctgctttggagaattccattgcaatttacaatgaaaacagagcagttatgcgtgaatttgtaaaggttgcagctgattaccctcaggtaattgatgcagttagccgtcatgctgttttcaaagcaagacagttcatgttaaaagaaaaacacacagcacttgtaaaagagctcattgctgaaattaaggctacacctgttcagccttgggatggcaagaaagttgttgttacaggtatcttacttgagcccaacgaattgcttgatatcttcaatgaattcaaaattgctatcgttgatgacgatttggctcaggaatccagacagattcgtgttgacgttctggatggcgaaggtggccctctttatagaatggcaaaagcttggcagcaaatgtacggttgctctcttgcaactgatacaaagaaaggccgcggcagaatgctgatcaacaagacaattcagacaggtgcagatgctatcgttgttgcgatgatgaaattctgtgatcctgaagaatgggattaccctgtaatgtacagagaatttgaagaaaaaggcgttaagagtctgatgatcgaagttgatcaggaagtttcttccttcgaacagatcaagacaagactgcagtctttcgtagaaatgctgtaaagtataggaggactacatgagcggaacaggacgactggcaggaaagattgcgttaattaccggtggcgccggcaatatcggcagtgaattgacacgtcgctttctcgcagagggagcgacggtcattattagtggacggaatcgggcgaagttgaccgcactggccgaacggatgcaggcagaggcaggagtgccggcaaagcgcatcgatctcgaagtcatggatgggagtgatccggtcgcggtacgtgccggtatcgaagcgattgtggcccgtcacggccagatcgacattctggtcaacaatgcaggaagtgccggtgcccagcgtcgtctggccgagattccactcactgaagctgaattaggccctggcgccgaagagacgcttcatgccagcatcgccaatttacttggtatgggatggcatctgatgcgtattgcggcacctcatatgccggtaggaagtgcggtcatcaatgtctcgaccatcttttcacgggctgagtactacgggcggattccgtatgtcacccctaaagctgctcttaatgctctatctcaacttgctgcgcgtgagttaggtgcacgtggcatccgcgttaatacgatctttcccggcccgattgaaagtgatcgcatccgtacagtgttccagcgtatggatcagctcaaggggcggcccgaaggcgacacagcgcaccattttttgaacaccatgcgattgtgtcgtgccaacgaccagggcgcgcttgaacgtcggttcccctccgtcggtgatgtggcagacgccgctgtctttctggccagtgccgaatccgccgctctctccggtgagacgattgaggttacgcacggaatggagttgccggcctgcagtgagaccagcctgctggcccgtactgatctgcgcacgattgatgccagtggccgcacgacgctcatctgcgccggcgaccagattgaagaggtgatggcgctcaccggtatgttgcgtacctgtgggagtgaagtgatcatcggcttccgttcggctgcggcgctggcccagttcgagcaggcagtcaatgagagtcggcggctggccggcgcagactttacgcctcccattgccttgccactcgatccacgcgatccggcaacaattgacgctgtcttcgattgggccggcgagaataccggcgggattcatgcagcggtgattctgcctgctaccagtcacgaaccggcaccgtgcgtgattgaggttgatgatgagcgggtgctgaattttctggccgatgaaatcaccgggacaattgtgattgccagtcgcctggcccgttactggcagtcgcaacggcttacccccggcgcacgtgcgcgtgggccgcgtgtcatttttctctcgaacggtgccgatcaaaatgggaatgtttacggacgcattcaaagtgccgctatcggtcagctcattcgtgtgtggcgtcacgaggctgaacttgactatcagcgtgccagcgccgccggtgatcatgtgctgccgccggtatgggccaatcagattgtgcgcttcgctaaccgcagccttgaagggttagaatttgcctgtgcctggacagctcaattgctccatagtcaacgccatatcaatgagattaccctcaacatccctgccaacattagcgccaccaccggcgcacgcagtgcatcggtcggatgggcggaaagcctgatcgggttgcatttggggaaagttgccttgattaccggtggcagcgccggtattggtgggcagatcgggcgcctcctggctttgagtggcgcgcgcgtgatgctggcagcccgtgatcggcataagctcgaacagatgcaggcgatgatccaatctgagctggctgaggtggggtataccgatgtcgaagatcgcgtccacattgcaccgggctgcgatgtgagtagcgaagcgcagcttgcggatcttgttgaacgtaccctgtcagcttttggcaccgtcgattatctgatcaacaacgccgggatcgccggtgtcgaagagatggttatcgatatgccagttgagggatggcgccataccctcttcgccaatctgatcagcaactactcgttgatgcgcaaactggcgccgttgatgaaaaaacagggtagcggttacatccttaacgtctcatcatactttggcggtgaaaaagatgcggccattccctaccccaaccgtgccgattacgccgtctcgaaggctggtcagcgggcaatggccgaagtctttgcgcgcttccttggcccggagatacagatcaatgccattgcgccgggtccggtcgaaggtgatcgcttgcgcggtaccggtgaacgtcccggcctctttgcccgtcgggcgcggctgattttggagaacaagcggctgaatgagcttcacgctgctcttatcgcggctgcgcgcaccgatgagcgatctatgcacgaactggttgaactgctcttacccaatgatgtggccgcactagagcagaatcccgcagcacctaccgcgttgcgtgaactggcacgacgttttcgcagcgaaggcgatccggcggcatcatcaagcagtgcgctgctgaaccgttcaattgccgctaaattgctggctcgtttgcataatggtggctatgtgttgcctgccgacatctttgcaaacctgccaaacccgcccgatcccttcttcacccgagcccagattgatcgcgaggctcgcaaggttcgtgacggcatcatggggatgctctacctgcaacggatgccgactgagtttgatgtcgcaatggccaccgtctattaccttgccgaccgcaatgtcagtggtgagacattccacccatcaggtggtttgcgttacgaacgcacccctaccggtggcgaactcttcggcttgccctcaccggaacggctggcggagctggtcggaagcacggtctatctgataggtgaacatctgactgaacaccttaacctgcttgcccgtgcgtacctcgaacgttacggggcacgtcaggtagtgatgattgttgagacagaaaccggggcagagacaatgcgtcgcttgctccacgatcacgtcgaggctggtcggctgatgactattgtggccggtgatcagatcgaagccgctatcgaccaggctatcactcgctacggtcgcccagggccggtcgtctgtacccccttccggccactgccgacggtaccactggtcgggcgtaaagacagtgactggagcacagtgttgagtgaggctgaatttgccgagttgtgcgaacaccagctcacccaccatttccgggtagcgcgcaagattgccctgagtgatggtgccagtctcgcgctggtcactcccgaaactacggctacctcaactaccgagcaatttgctctggctaacttcatcaaaacgacccttcacgcttttacggctacgattggtgtcgagagcgaaagaactgctcagcgcattctgatcaatcaagtcgatctgacccggcgtgcgcgtgccgaagagccgcgtgatccgcacgagcgtcaacaagaactggaacgttttatcgaggcagtcttgctggtcactgcaccactcccgcctgaagccgatacccgttacgccgggcggattcatcgcggacgggcgattaccgtgtaaaatcataggaggatcaacatgtttatgcgatatattatggttgaggaacagaccctgaagaccgggtcacaggaactagaggagaaggcagactataacatgagatattacgctcacctcatgaagttgagtaaggaaaaacctgcagagttctggggatctctagcacaggacctgctagactggtatgagccttggaaggagaccatgagacaggaagacccgatgacaaggtggttcataggaggtaagataaatgcctcgtacaacgctgtcgacagacacctcaacggccccagaaagttcaaggctgcggtcatctgggaaagtgagttaggggaaaggaagatcgtgacgtatcaggacatgttctatgaggttaataggtgggccaatgcgctcagatccctaggagttggtaaaggggatagggtgaccatatacatgcccctgaccccagagggaatagctgcaatgctggcctcggccaggataggtgcaattcatagcgtaatatttgccggctttggttcgcaagccatagccgacagggttgaggacgccaaggcgaaggtagtgatcactgctgacgcctatcccagaaggggaaaggttgtggagttaaagaagactgtcgacgaggccttaaactcccttggagaaaggagcccagtacagcacgtgctcgtgtataggaggatgaaaacggatgtaaacatgaaggagggaagagacgttttcttcgacgaggtcggcaagtacaggtacgtggagcctgaaaggatggactccaatgatccactcttcattctctacacctctgggaccaccggtaaacctaagggaattatgcactctaccggtggttatctgaccgggacagccgttatgctactgtggagctacggccttagccaggagaacgacgttctcttcaacacctcagatattggttggatagttggccactcctacattacctattccccccttatcatggggagaacggttgtcatttacgagagcgccccagactatccctacccagacaagtgggctgagattattgagagatacagggcaaccactttcggcacctcagctacagccttgcgttacttcatgaagtatggggacgaatacgtgaagaaccacgatctctcgtccatcaggataattgtgacgaacggggaagtgcttaactactctccgtggaagtgggggctagaagtgttaggtggaggaaaggtattcatgtcccatcagtggtggcaaactgagacaggcgcaccgaacctgggctaccttccgggtataatttacatgccaatgaagtcgggtccagcctcaggcttccctctacccggtaacttcgtggaggttctggacgagaacggaaatccctctgcccctagagtgagaggataccttgtaatgaggccacccttcccgcctaacatgatgatggggatgtggaacgataatggggagaggttgaagaagacgtactttagcaagttcggttccctgtattatccaggagacttcgccatggtggatgaggatggatacatctgggtgttgggtagggcagacgagactctaaaaattgcagcccacagaattggagctggggaagtggaatcagcaatcacttctcacccatcggttgccgaggcagcagtcataggcgtgccagactcagtgaaaggagaagaggttcacgcgttcgttgtgctaaagcaaggttacgctccttcctctgaactggctaaggacatacagtcacacgttaggaaggtcatggggcccattgttagtccgcagattcatttcgtggataagttgcctaagacaaggtctgggaaggtcatgagaagggtgataaaggcagtgatgatgggttcgagtgctggcgacttaaccaccatagaggacgaagcatcaatggacgaaataaagaaggctgtcgaggaactaaagaaggagttaaagacctcctagacatcgaaggaggactactatggaatttgaaacaatagaaactaaaaaagaaggaaacttgttctggattacgttaaatagacccgataaactaaacgcactaaacgctaaattacttgaggagttagatagggcagtctctcaggcagagtctgacccagagattagggttatcatcattacagggaaaggaaaggccttctgcgcaggggctgacataacccagtttaaccagttaaccccagcagaagcctggaaattctctaagaaaggaagagagatcatggacaagatagaggcactgagcaaacccaccattgccatgatcaatggatatgcccttgggggtggactagagctagccttagcctgtgatataaggatcgcagcggaggaggcccaactaggccttccagagataaacctagggatatatccggggtatggggggactcagaggttaaccagagttataggaaagggaagagccctggagatgatgatgacgggcgatcgtattcctggtaaggatgctgagaaatatggtctcgtgaatagggttgtccccctagctaacttggagcaagagacaaggaagctggcagaaaagatagccaagaagtctcctatctctctcgccttaatcaaggaagttgtaaacaggggactagactctcccctactgtcaggtctagcgttggaaagcgtaggatggggagtcgtgttttctacggaggacaagaaggagggggtaagtgccttcctggagaagagagagcctacgtttaagggaaaatagaactagaggaggactactatgctcctatttccaagaagaactaatatagcctttttcaaaacaacaggcatttttgctaattttcctttgctaggtagaaccattacaacttcaccatctttccttacacataaactgtcaaaggaagtaaccagggcatcaacttcgcctccaagaccaaagagaattgttgtcgcaattactggtgcgactggtgttgcactgggaatcagacttctacaagtgctaaaagagttgagcgtagaaacccatttggtgatttcaaaatggggtgcagcaacaatgaaatatgaaacagattgggaaccgcatgacgtggcggccttggcaaccaagacatactctgttcgtgatgtttctgcatgcatttcgtccggatctttccagcatgatggtatgattgttgtgccctgttccatgaaatcactagctgctattagaatcggttttacagaggatttaattacaagagctgccgatgtttcgattaaagagaatcgtaagttactactggttactcgggaaacccctttatcttccatccatcttgaaaacatgttgtctttatgcagggcaggtgttataatttttcctccggtacctgcgttttatacaagacccaagagccttcatgacctattagaacaaagtgttggcaggatcctagactgctttggcatccacgctgacacttttcctcgttgggaaggaataaaaagcaagtaacttacaggaggatcacaagatgacgcgtgaagtggtagtggtaagcggtgtccgtaccgcgatcgggacctttggcggcagcctgaaggatgtggcaccggcggagctgggcgcactggtggtgcgcgaggcgctggcgcgcgcgcaggtgtcgggcgacgatgtcggccacgtggtattcggcaacgtgatccagaccgagccgcgcgacatgtatctgggccgcgtcgcggccgtcaacggcggggtgacgatcaacgcccccgcgctgaccgtgaaccgcctgtgcggctcgggcctgcaggccattgtcagcgccgcgcagaccatcctgctgggcgataccgacgtcgccatcggcggcggcgcggaaagcatgagccgcgcaccgtacctggcgccggcagcgcgctggggcgcacgcatgggcgacgccggcctggtcgacatgatgctgggtgcgctgcacgatcccttccatcgcatccacatgggcgtgaccgccgagaatgtcgccaaggaatacgacatctcgcgcgcgcagcaggacgaggccgcgctggaatcgcaccgccgcgcttcggcagcgatcaaggccggctacttcaaggaccagatcgtcccggtggtgagcaagggccgcaagggcgacgtgaccttcgacaccgacgagcacgtgcgccatgacgccaccatcgacgacatgaccaagctcaggccggtcttcgtcaaggaaaacggcacggtcacggccggcaatgcctcgggcctgaacgacgccgccgccgcggtggtgatgatggagcgcgccgaagccgagcgccgcggcctgaagccgctggcccgcctggtgtcgtacggccatgccggcgtggacccgaaggccatgggcatcggcccggtgccggcgacgaagatcgcgctggagcgcgccggcctgcaggtgtcggacctggacgtgatcgaagccaacgaagcctttgccgcacaggcgtgcgccgtgaccaaggcgctcggtctggacccggccaaggttaacccgaacggctcgggcatctcgctgggccacccgatcggcgccaccggtgccctgatcacggtgaaggcgctgcatgagctgaaccgcgtgcagggccgctacgcgctggtgacgatgtgcatcggcggcgggcagggcattgccgccatcttcgagcgtatctgaacggaaggaggcagatatgtctacaacacataacgtccctcagggcgatcttgttttacgtactttagccatgcccgccgataccaatgccaatggtgacatctttggtggttggttaatgtcacaaatggatattggcggcgctattctggcaaaagaaattgcccacggtcgcgtagtgactgtgcgggttgaaggaatgactttcttacggccggttgcggtcggcgatgtggtgtgctgctatgcacgctgtgtccagaaagggacgacatcggtcagcattaatattgaagtgtgggtgaaaaaagtagcgtctgaaccaatcgggcaacggtataaagcgacagaagcattatttaagtatgtcgcggttgatcctgaaggaaaacctcgcgccttacctgttgagtaactatcataaaaataagaagcctgcatttgcaggcttcttatttttat

SEQ ID NO: 41 - DNA, 19491 bp, artificial sequence
  plasmid SG598
aaggccagcaaaaggccaggaaccgtaaaaaggccgcgttgctggcgtttttccataggctccgcccccctgacgagcatcacaaaaatcgacgctcaagtcagaggtggcgaaacccgacaggactataaagataccaggcgtttccccctggaagctccctcgtgcgctctcctgttccgaccctgccgcttaccggatacctgtccgcctttctcccttcgggaagcgtggcgctttctcatagctcacgctgtaggtatctcagttcggtgtaggtcgttcgctccaagctgggctgtgtgcacgaaccccccgttcagcccgaccgctgcgccttatccggtaactatcgtcttgagtccaacccggtaagacacgacttatcgccactggcagcagccactggtaacaggattagcagagcgaggtatgtaggcggtgctacagagttcttgaagtggtggcctaactacggctacactagaagaacagtatttggtatctgcgctctgctgaagccagttaccttcggaaaaagagttggtagctcttgatccggcaaacaaaccaccgctggtagcggtggtttttttgtttgcaagcagcagattacgcgcagaaaaaaaggatctcaagaagatcctttgatcttttctacggggtctgacgctcagtggaacgaaaactcacgttaagggattttggtcatgagattatcaaaaaggatcttcacctagatccttttaaattaaaaatgaagttttaaatcaatctaaagtatatatgagtaaacttggtctgacagctcttcctttttcaatattattgaagcatttatcagggttattgtctcatgagcggatacatatttgaatgtatttagaaaaataaacaaataggggttccgcgcacatttccccgaaaagtgccacctgacggtcctgcatcagctcttatatattaagctaccaacttagtatataagccaaaacttaaatgtgctaccaacacatcaagccgttagagaactctatctatagcaatatttcaaatgtaccgacatacaagagaaacattaactatatatattcaatttatgagattatcttaacagatataaatgtaaattgcaataagtaagatttagaagtttatagcctttgtgtattggaagcagtacgcaaaggcttttttatttgataaaaattagaagtatatttattttttcataattaatttatgaaaatgaaagggggtgagcaaagtgacagaggaaagcagtatcttatcaaataacaaggtattagcaatatcattattgactttagcagtaaacattatgacttttatagtgcttgtagctaagtagtacgaaagggggagctttaaaaagctccttggaatacatagaattcataaattaatttatgaaaagaagggcgtatatgaaaacttgtaaaaattgcaaagagtttattaaagatactgaaatatgcaaaatacattcgttgatgattcatgataaaacagtagcaacctattgcagtaaatacaatgagtcaagatgtttacataaagggaaagtccaatgtattaattgttcaaagatgaaccgatatggatggtgtgccataaaaatgagatgttttacagaggaagaacagaaaaaagaacgtacatgcattaaatattatgcaaggagctttaaaaaagctcatgtaaagaagagtaaaaagaaaaaataatttatttattaatttaatattgagagtgccgacacagtatgcactaaaaaatatatctgtggtgtagtgagccgatacaaaaggatagtcactcgcattttcataatacatcttatgttatgattatgtgtcggtgggacttcacgacgaaaacccacaataaaaaaagagttcggggtagggttaagcatagttgaggcaactaaacaatcaagctaggatatgcagtagcagaccgtaaggtcgttgtttaggtgtgttgtaatacatacgctattaagatgtaaaaatacggataccaatgaagggaaaagtataatttttggatgtagtttgtttgttcatctatgggcaaactacgtccaaagccgtttccaaatctgctaaaaagtatatcctttctaaaatcaaagtcaagtatgaaatcataaataaagtttaattttgaagttattatgatattatgtttttctattaaaataaattaagtatatagaatagtttaataatagtatatacttaatgtgataagtgtctgacagtgtcacagaaaggatgattgttatggattataagcggccggccagtgggcaagttgaaaaattcacaaaaatgtggtataatatctttgttcattagagcgataaacttgaatttgagagggaacttagatggtatttgaaaaaattgataaaaatagttggaacagaaaagagtattttgaccactactttgcaagtgtaccttgtacctacagcatgaccgttaaagtggatatcacacaaataaaggaaaagggaatgaaactatatcctgcaatgctttattatattgcaatgattgtaaaccgccattcagagtttaggacggcaatcaatcaagatggtgaattggggatatatgatgagatgataccaagctatacaatatttcacaatgatactgaaacattttccagcctttggactgagtgtaagtctgactttaaatcatttttagcagattatgaaagtgatacgcaacggtatggaaacaatcatagaatggaaggaaagccaaatgctccggaaaacatttttaatgtatctatgataccgtggtcaaccttcgatggctttaatctgaatttgcagaaaggatatgattatttgattcctatttttactatggggaaatattataaagaagataacaaaattatacttcctttggcaattcaagttcatcacgcagtatgtgacggatttcacatttgccgttttgtaaacgaattgcaggaattgataaatagttaacttcaggtttgtctgtaactaaaaacaagtatttaagcaaaaacatcgtagaaatacggtgttttttgttaccctaagtttgttaagggatgcataaactgcatcccttaacttgtttttcgtgtacctattttttgtgaatcgattatgtcttttgcgcattcgtcgacaattgcatatattgataaaaataataatagtgggtataattaagttgttaggaggttagttagagtgaaaccagtaacgttatacgatgtcgcagagtatgccggtgtctcttatcagaccgtttcccgcgtggtgaaccaggccagccacgtttctgcgaaaacgcgggaaaaagtggaagcggcgatggcggagctgaattacattcccaaccgcgtggcacaacaactggcgggcaaacagtcgttgctgattggcgttgccacctccagtctggccctgcacgcgccgtcgcaaattgtcgcggcgattaaatctcgcgccgatcaactgggtgccagcgtggtggtgtcgatggtagaacgaagcggcgtcgaagcctgtaaagcggcggtgcacaatcttctcgcgcaacgcgtcagtgggctgatcattaactatccgctggatgaccaggatgccattgctgtggaagctgcctgcactaatgttccggcgttatttcttgatgtctctgaccagacacccatcaacagtattattttctcccatgaagacggtacgcgactgggcgtggagcatctggtcgcattgggtcaccagcaaatcgcgctgttagcgggcccattaagttctgtctcggcgcgtctgcgtctggctggctggcataaatatctcactcgcaatcaaattcagccgatagcggaacgggaaggcgactggagtgccatgtccggttttcaacaaaccatgcaaatgctgaatgagggcatcgttcccactgcgatgctggttgccaacgatcagatggcgctgggcgcaatgcgcgccattaccgagtccgggctgcgcgttggtgcggacatctcggtagtgggatacgacgataccgaagacagctcatgttatatcccgccgttaaccaccatcaaacaggattttcgcctgctggggcaaaccagcgtggaccgcttgctgcaactctctcagggccaggcggtgaagggcaatcagctgttgcccgtctcactggtgaaaagaaaaaccaccctggcgcccaatacgcaaaccgcctctccccgcgcgttggccgattcattaatgcagctggcacgacaggtttcccgactggaaagcgggcagtgagcgcaacgcaattaatgtaagttagctcactcattaggcaccgggatctcgaccgatgcccttgagagccttcaacccagtcagctccttccggtgggcgcggggcatgactagcatgatcgtgctcctgtcgttgaggacccggctaggctggcggggttgccttactggttagcagaatgaatcaccgatacgcggctcagctagcacccggaattgtgagcggataacaattccttggaattgtgagcggataacaattataattaagttgttaggaggttagaatgagtctgaatttccttgattttgaacagccgattgcagagctggaagcgaaaatcgattctctgactgcggttagccgtcaggatgagaaactggatattaacatcgatgaagaagtgcatcgtctgcgtgaaaaaagcgtagaactgacacgtaaaatcttcgccgatctcggtgcatggcagattgcgcaactggcacgccatccacagcgtccttataccctggattacgttcgcctggcatttgatgaatttgacgaactggctggcgaccgcgcgtatgcagacgataaagctatcgtcggtggtatcgcccgtctcgatggtcgtccggtgatgatcattggtcatcaaaaaggtcgtgaaaccaaagaaaaaattcgccgtaactttggtatgccagcgccagaaggttaccgcaaagcactgcgtctgatgcaaatggctgaacgctttaagatgccaatcatcacctttatcgacaccccgggggcttatccgggcgtgggcgcagaagagcgcggtcagtctgaagccattgcacgcaacctgcgtgaaatgtctcgccttagcgtaccgactatttgtaccgttatcggtgaaggtggttctggcggcgcgctggcgattggcgtgggcgataaagtgaatatgctgcaatacagcacctattccgttatctcgccggaaggttgtgcgtccattctgtggaagagcgctgataaagcgccgctggcggctgaagcgatgggtatcatcgctccgcgtctgaaagaactaaaactgatcgactccatcatcccagaaccgctgggtggtgctcaccgtaacccggaagcgatggcggcatcgttgaaagcgcaactgttggcggatctggccgatctcgacgtgttaagcactgaagatttaaaaaatcgtcgttatcagcgcctgatgagctacggttacgcgtaataaggaggaacccactcatggatattcgtaagattaaaaaactgatcgagctggttgaagaatcaggcatctccgaactggaaatttctgaaggcgaagagtcagtacgcattagccgtgcagctcctgccgcaagtttccctgtgatgcaacaagcttacgctgcaccaatgatgcagcagccagctcaatctaacgcagccgctccggcgaccgttccttccatggaagcgccagcagcagcggaaatcagtggtcacatcgtacgttccccgatggttggtactttctaccgcaccccaagcccggacgcaaaagcgttcatcgaagtgggtcagaaagtcaacgtgggcgataccctgtgcatcgttgaagccatgaaaatgatgaaccagatcgaagcggacaaatccggtaccgtgaaagcaattctggtcgaaagtggacaaccggtagaatttgacgagccgctggtcgtcatcgagtaacgaggcgaacatgctggataaaattgttattgccaaccgcggcgagattgcattgcgtattcttcgtgcctgtaaagaactgggcatcaagactgtcgctgtgcactccagcgcggatcgcgatctaaaacacgtattactggcagatgaaacggtctgtattggccctgctccgtcagtaaaaagttatctgaacatcccggcaatcatcagcgccgctgaaatcaccggcgcagtagcaatccatccgggttacggcttcctctccgagaacgccaactttgccgagcaggttgaacgctccggctttatcttcattggcccgaaagcagaaaccattcgcctgatgggcgacaaagtatccgcaatcgcggcgatgaaaaaagcgggcgtcccttgcgtaccgggttctgacggcccgctgggcgacgatatggataaaaaccgtgccattgctaaacgcattggttatccggtgattatcaaagcctccggcggcggcggcggtcgcggtatgcgcgtagtgcgcggcgacgctgaactggcacaatccatctccatgacccgtgcggaagcgaaagctgctttcagcaacgatatggtttacatggagaaatacctggaaaatcctcgccacgtcgagattcaggtactggctgacggtcagggcaacgctatctatctggcggaacgtgactgctccatgcaacgccgccaccagaaagtggtcgaagaagcgccagcaccgggcattaccccggaactgcgtcgctacatcggcgaacgttgcgctaaagcgtgtgttgatatcggctatcgcggtgcaggtactttcgagttcctgttcgaaaacggcgagttctatttcatcgaaatgaacacccgtattcaggtagaacacccggttacagaaatgatcaccggcgttgacctgatcaaagaacagctgcgtatcgctgccggtcaaccgctgtcgatcaagcaagaagaagttcacgttcgcggccatgcggtggaatgtcgtatcaacgccgaagatccgaacaccttcctgccaagtccgggcaaaatcacccgtttccacgcacctggcggttttggcgtacgttgggagtctcatatctacgcgggctacaccgtaccgccgtactatgactcaatgatcggtaagctgatttgctacggtgaaaaccgtgacgtggcgattgcccgcatgaagaatgcgctgcaggagctgatcatcgacggtatcaaaaccaacgttgatctgcagatccgcatcatgaatgacgagaacttccagcatggtggcactaacatccactatctggagaaaaaactcggtcttcaggaaaaataatataggaggatataacatgagctggattgaacgaattaaaagcaacattactcccacccgcaaggcgagcattcctgaaggggtgtggactaagtgtgatagctgcggtcaggttttataccgcgctgagctggaacgtaatcttgaggtctgtccgaagtgtgaccatcacatgcgtatgacagcgcgtaatcgcctgcatagcctgttagatgaaggaagccttgtggagctgggtagcgagcttgagccgaaagatgtgctgaagtttcgtgactccaagaagtataaagaccgtctggcatctgcgcagaaagaaaccggcgaaaaagatgcgctggtggtgatgaaaggcactctgtatggaatgccggttgtcgctgcggcattcgagttcgcctttatgggcggttcaatggggtctgttgtgggtgcacgtttcgtgcgtgccgttgagcaggcgctggaagataactgcccgctgatctgcttctccgcctctggtggcgcacgtatgcaggaagcactgatgtcgctgatgcagatggcgaaaacctctgcggcactggcaaaaatgcaggagcgcggcttgccgtacatctccgtgctgaccgacccgacgatgggcggtgtttctgcaagtttcgccatgctgggcgatctcaacatcgctgaaccgaaagcgttaatcggctttgccggtccgcgtgttatcgaacagaccgttcgcgaaaaactgccgcctggattccagcgcagtgaattcctgatcgagaaaggcgcgatcgacatgatcgtccgtcgtccggaaatgcgcctgaaactggcgagtattctggcgaagttgatgaatctgccagcgccgaatcctgaagcgccgcgtgaaggcgtagtggtacccccggtaccggatcaggaacctgaggcctgagactaggaggatcttaaaaaggagtgtatataaatgagtttaacacaaggcatgaaagcaaaacagttgttagcctactttcagggaaaggctgatcaagatgcaagagaagcaaaagcaagaggcgaacttgtttgttggtctgcttccgtagctccccctgaattctgcgtgacaatgggtatcgcaatgatttatcctgagacccacgcagcaggtattggcgcaagaaaaggcgcaatggacatgttggaagttgctgatagaaaaggctacaatgttgactgctgttcttacggcagagtaaacatgggttacatggaatgcctgaaggaagctgcaattacaggtgtaaaacctgaggttttggtcaactctcctgcagcagacgttcctctgcctgacttggtaatcacatgtaataacatttgtaatacattgttgaaatggtatgaaaaccttgcggcagaattagacattccttgcatcgttatcgacgttcctttcaaccacacaatgcctattcctgaatatgcaaaagcttacattgcagatcagtttagaaatgcaatttctcagctggaagtaatctgtggtagaccttttgactggaagaagtttaaagaagttaaagatcagacacagcgttctgtataccactggaacagaattgcagaaatggctaaatataaaccatcacctttgaatggcttcgacttgtttaattacatggcattgatcgttgcttgccgttctttggattatgctgaaattacattcaaagcatttgctgatgaattagaagaaaacttgaaggctggtatctatgcattcaagggcgctgaaaagactcgtttccaatgggaaggtattgctgtatggcctcacttgggtcacacattcaagtccatgaagaacctcaattctatcatgacaggtacagcttaccctgcactttgggatttgcactatgatgcaaacgatgaatctatgcactctatggcagaagcttatacaagaatttatattaacacatgcttacagaacaaagttgaagttttgttgggcatcatggaaaaaggccaggttgacggtacagtttatcacttgaacagaagctgtaagttgatgagcttcctgaacgttgaaacagctgaaattatcaaagaaaagaatggtttgccttatgtaagcatcgatggtgaccagacagatcctcgcgtattctctcccgcacagtttgatacacgtgttcaggcactggttgaaatgatggaagccaacatggctgcagcagaataaatcacaaggaggatcacatgagtagagtagaagctattttatcccaattaaaagacgttgccgcaaatcctaaaaaggcaatggatgattataaggcggaaacaggtaagggtgcagtaggtattatgcctatttactcccctgaagaaatggtacacgcagctggttatttgcctatgggtatctggggtgcacaaggtaaaacaatttccaaggctcgtacatatcttcctgcatttgcttgttcagttatgcagcaggttatggaactgcagtgtgaaggcgcttatgatgacctttctgctgtaattttctctgtaccttgtgatacattaaagtgcttaagccagaaatggaaaggcacatcccctgtaattgtatttacacatcctcagaacagaggcttggaagctgcaaatcagttcttagtaacagagtatgaattggtaaaggctcagcttgaatcagttttgggtgtaaaaatttcaaacgctgctttggagaattccattgcaatttacaatgaaaacagagcagttatgcgtgaatttgtaaaggttgcagctgattaccctcaggtaattgatgcagttagccgtcatgctgttttcaaagcaagacagttcatgttaaaagaaaaacacacagcacttgtaaaagagctcattgctgaaattaaggctacacctgttcagccttgggatggcaagaaagttgttgttacaggtatcttacttgagcccaacgaattgcttgatatcttcaatgaattcaaaattgctatcgttgatgacgatttggctcaggaatccagacagattcgtgttgacgttctggatggcgaaggtggccctctttatagaatggcaaaagcttggcagcaaatgtacggttgctctcttgcaactgatacaaagaaaggccgcggcagaatgctgatcaacaagacaattcagacaggtgcagatgctatcgttgttgcgatgatgaaattctgtgatcctgaagaatgggattaccctgtaatgtacagagaatttgaagaaaaaggcgttaagagtctgatgatcgaagttgatcaggaagtttcttccttcgaacagatcaagacaagactgcagtctttcgtagaaatgctgtaaagtataggaggactacatgagcggaacaggacgactggcaggaaagattgcgttaattaccggtggcgccggcaatatcggcagtgaattgacacgtcgctttctcgcagagggagcgacggtcattattagtggacggaatcgggcgaagttgaccgcactggccgaacggatgcaggcagaggcaggagtgccggcaaagcgcatcgatctcgaagtcatggatgggagtgatccggtcgcggtacgtgccggtatcgaagcgattgtggcccgtcacggccagatcgacattctggtcaacaatgcaggaagtgccggtgcccagcgtcgtctggccgagattccactcactgaagctgaattaggccctggcgccgaagagacgcttcatgccagcatcgccaatttacttggtatgggatggcatctgatgcgtattgcggcacctcatatgccggtaggaagtgcggtcatcaatgtctcgaccatcttttcacgggctgagtactacgggcggattccgtatgtcacccctaaagctgctcttaatgctctatctcaacttgctgcgcgtgagttaggtgcacgtggcatccgcgttaatacgatctttcccggcccgattgaaagtgatcgcatccgtacagtgttccagcgtatggatcagctcaaggggcggcccgaaggcgacacagcgcaccattttttgaacaccatgcgattgtgtcgtgccaacgaccagggcgcgcttgaacgtcggttcccctccgtcggtgatgtggcagacgccgctgtctttctggccagtgccgaatccgccgctctctccggtgagacgattgaggttacgcacggaatggagttgccggcctgcagtgagaccagcctgctggcccgtactgatctgcgcacgattgatgccagtggccgcacgacgctcatctgcgccggcgaccagattgaagaggtgatggcgctcaccggtatgttgcgtacctgtgggagtgaagtgatcatcggcttccgttcggctgcggcgctggcccagttcgagcaggcagtcaatgagagtcggcggctggccggcgcagactttacgcctcccattgccttgccactcgatccacgcgatccggcaacaattgacgctgtcttcgattgggccggcgagaataccggcgggattcatgcagcggtgattctgcctgctaccagtcacgaaccggcaccgtgcgtgattgaggttgatgatgagcgggtgctgaattttctggccgatgaaatcaccgggacaattgtgattgccagtcgcctggcccgttactggcagtcgcaacggcttacccccggcgcacgtgcgcgtgggccgcgtgtcatttttctctcgaacggtgccgatcaaaatgggaatgtttacggacgcattcaaagtgccgctatcggtcagctcattcgtgtgtggcgtcacgaggctgaacttgactatcagcgtgccagcgccgccggtgatcatgtgctgccgccggtatgggccaatcagattgtgcgcttcgctaaccgcagccttgaagggttagaatttgcctgtgcctggacagctcaattgctccatagtcaacgccatatcaatgagattaccctcaacatccctgccaacattagcgccaccaccggcgcacgcagtgcatcggtcggatgggcggaaagcctgatcgggttgcatttggggaaagttgccttgattaccggtggcagcgccggtattggtgggcagatcgggcgcctcctggctttgagtggcgcgcgcgtgatgctggcagcccgtgatcggcataagctcgaacagatgcaggcgatgatccaatctgagctggctgaggtggggtataccgatgtcgaagatcgcgtccacattgcaccgggctgcgatgtgagtagcgaagcgcagcttgcggatcttgttgaacgtaccctgtcagcttttggcaccgtcgattatctgatcaacaacgccgggatcgccggtgtcgaagagatggttatcgatatgccagttgagggatggcgccataccctcttcgccaatctgatcagcaactactcgttgatgcgcaaactggcgccgttgatgaaaaaacagggtagcggttacatccttaacgtctcatcatactttggcggtgaaaaagatgcggccattccctaccccaaccgtgccgattacgccgtctcgaaggctggtcagcgggcaatggccgaagtctttgcgcgcttccttggcccggagatacagatcaatgccattgcgccgggtccggtcgaaggtgatcgcttgcgcggtaccggtgaacgtcccggcctctttgcccgtcgggcgcggctgattttggagaacaagcggctgaatgagcttcacgctgctcttatcgcggctgcgcgcaccgatgagcgatctatgcacgaactggttgaactgctcttacccaatgatgtggccgcactagagcagaatcccgcagcacctaccgcgttgcgtgaactggcacgacgttttcgcagcgaaggcgatccggcggcatcatcaagcagtgcgctgctgaaccgttcaattgccgctaaattgctggctcgtttgcataatggtggctatgtgttgcctgccgacatctttgcaaacctgccaaacccgcccgatcccttcttcacccgagcccagattgatcgcgaggctcgcaaggttcgtgacggcatcatggggatgctctacctgcaacggatgccgactgagtttgatgtcgcaatggccaccgtctattaccttgccgaccgcaatgtcagtggtgagacattccacccatcaggtggtttgcgttacgaacgcacccctaccggtggcgaactcttcggcttgccctcaccggaacggctggcggagctggtcggaagcacggtctatctgataggtgaacatctgactgaacaccttaacctgcttgcccgtgcgtacctcgaacgttacggggcacgtcaggtagtgatgattgttgagacagaaaccggggcagagacaatgcgtcgcttgctccacgatcacgtcgaggctggtcggctgatgactattgtggccggtgatcagatcgaagccgctatcgaccaggctatcactcgctacggtcgcccagggccggtcgtctgtacccccttccggccactgccgacggtaccactggtcgggcgtaaagacagtgactggagcacagtgttgagtgaggctgaatttgccgagttgtgcgaacaccagctcacccaccatttccgggtagcgcgcaagattgccctgagtgatggtgccagtctcgcgctggtcactcccgaaactacggctacctcaactaccgagcaatttgctctggctaacttcatcaaaacgacccttcacgcttttacggctacgattggtgtcgagagcgaaagaactgctcagcgcattctgatcaatcaagtcgatctgacccggcgtgcgcgtgccgaagagccgcgtgatccgcacgagcgtcaacaagaactggaacgttttatcgaggcagtcttgctggtcactgcaccactcccgcctgaagccgatacccgttacgccgggcggattcatcgcggacgggcgattaccgtgtaaaatcataggaggatcaacatgtttatgcgatatattatggttgaggaacagaccctgaagaccgggtcacaggaactagaggagaaggcagactataacatgagatattacgctcacctcatgaagttgagtaaggaaaaacctgcagagttctggggatctctagcacaggacctgctagactggtatgagccttggaaggagaccatgagacaggaagacccgatgacaaggtggttcataggaggtaagataaatgcctcgtacaacgctgtcgacagacacctcaacggccccagaaagttcaaggctgcggtcatctgggaaagtgagttaggggaaaggaagatcgtgacgtatcaggacatgttctatgaggttaataggtgggccaatgcgctcagatccctaggagttggtaaaggggatagggtgaccatatacatgcccctgaccccagagggaatagctgcaatgctggcctcggccaggataggtgcaattcatagcgtaatatttgccggctttggttcgcaagccatagccgacagggttgaggacgccaaggcgaaggtagtgatcactgctgacgcctatcccagaaggggaaaggttgtggagttaaagaagactgtcgacgaggccttaaactcccttggagaaaggagcccagtacagcacgtgctcgtgtataggaggatgaaaacggatgtaaacatgaaggagggaagagacgttttcttcgacgaggtcggcaagtacaggtacgtggagcctgaaaggatggactccaatgatccactcttcattctctacacctctgggaccaccggtaaacctaagggaattatgcactctaccggtggttatctgaccgggacagccgttatgctactgtggagctacggccttagccaggagaacgacgttctcttcaacacctcagatattggttggatagttggccactcctacattacctattccccccttatcatggggagaacggttgtcatttacgagagcgccccagactatccctacccagacaagtgggctgagattattgagagatacagggcaaccactttcggcacctcagctacagccttgcgttacttcatgaagtatggggacgaatacgtgaagaaccacgatctctcgtccatcaggataattgtgacgaacggggaagtgcttaactactctccgtggaagtgggggctagaagtgttaggtggaggaaaggtattcatgtcccatcagtggtggcaaactgagacaggcgcaccgaacctgggctaccttccgggtataatttacatgccaatgaagtcgggtccagcctcaggcttccctctacccggtaacttcgtggaggttctggacgagaacggaaatccctctgcccctagagtgagaggataccttgtaatgaggccacccttcccgcctaacatgatgatggggatgtggaacgataatggggagaggttgaagaagacgtactttagcaagttcggttccctgtattatccaggagacttcgccatggtggatgaggatggatacatctgggtgttgggtagggcagacgagactctaaaaattgcagcccacagaattggagctggggaagtggaatcagcaatcacttctcacccatcggttgccgaggcagcagtcataggcgtgccagactcagtgaaaggagaagaggttcacgcgttcgttgtgctaaagcaaggttacgctccttcctctgaactggctaaggacatacagtcacacgttaggaaggtcatggggcccattgttagtccgcagattcatttcgtggataagttgcctaagacaaggtctgggaaggtcatgagaagggtgataaaggcagtgatgatgggttcgagtgctggcgacttaaccaccatagaggacgaagcatcaatggacgaaataaagaaggctgtcgaggaactaaagaaggagttaaagacctcctagacatcgaaggaggactactatggaatttgaaacaatagaaactaaaaaagaaggaaacttgttctggattacgttaaatagacccgataaactaaacgcactaaacgctaaattacttgaggagttagatagggcagtctctcaggcagagtctgacccagagattagggttatcatcattacagggaaaggaaaggccttctgcgcaggggctgacataacccagtttaaccagttaaccccagcagaagcctggaaattctctaagaaaggaagagagatcatggacaagatagaggcactgagcaaacccaccattgccatgatcaatggatatgcccttgggggtggactagagctagccttagcctgtgatataaggatcgcagcggaggaggcccaactaggccttccagagataaacctagggatatatccggggtatggggggactcagaggttaaccagagttataggaaagggaagagccctggagatgatgatgacgggcgatcgtattcctggtaaggatgctgagaaatatggtctcgtgaatagggttgtccccctagctaacttggagcaagagacaaggaagctggcagaaaagatagccaagaagtctcctatctctctcgccttaatcaaggaagttgtaaacaggggactagactctcccctactgtcaggtctagcgttggaaagcgtaggatggggagtcgtgttttctacggaggacaagaaggagggggtaagtgccttcctggagaagagagagcctacgtttaagggaaaatagaactagaggaggactactatggaaaactttatcggaagccacatgatttatacgtatgaaaacggatgggaatacgagatttatattaaaaacgaccatacaattgattatagaattcatagcggaatggttgccggacgctgggttcgagatcaggaagtgaatattgtcaaactgacagaaggcgtatataaagtgtcttggacagagccgactggcacggatgtttcattaaactttatgccaaatgaaaaacgcatgcatggcattattttcttcccgaaatgggtgcatgaacatcctgaaattacggtttgctaccaaaatgaccacattgatttgatgaaagaatcccgcgaaaaatatgaaacgtatccaaaatacgttgtacctgaatttgcggaaattacatttctgaaaaatgaaggagtcgacaacgaagaagtgatttcgaaggctccttatgagggaatgacagacgatattcgcgcgggaagattataacttacaggaggatcacaagatgaaaaattgtgtcatcgtcagtgcggtacgtactgctatcggtagttttaacggttcactcgcttccaccagcgccatcgacctgggggcgacagtaattaaagccgccattgaacgtgcaaaaatcgattcacaacacgttgatgaagtgattatgggtaacgtgttacaagccgggctggggcaaaatccggcgcgtcaggcactgttaaaaagcgggctggcagaaacggtgtgcggattcacggtcaataaagtatgtggttcgggtcttaaaagtgtggcgcttgccgcccaggccattcaggcaggtcaggcgcagagcattgtggcggggggtatggaaaatatgagtttagccccctacttactcgatgcaaaagcacgctctggttatcgtcttggagacggacaggtttatgacgtaatcctgcgcgatggcctgatgtgcgccacccatggttatcatatggggattaccgccgaaaacgtggctaaagagtacggaattacccgtgaaatgcaggatgaactggcgctacattcacagcgtaaagcggcagccgcaattgagtccggtgcttttacagccgaaatcgtcccggtaaatgttgtcactcgaaagaaaaccttcgtcttcagtcaagacgaattcccgaaagcgaattcaacggctgaagcgttaggtgcattgcgcccggccttcgataaagcaggaacagtcaccgctgggaacgcgtctggtattaacgacggtgctgccgctctggtgattatggaagaatctgcggcgctggcagcaggccttacccccctggctcgcattaaaagttatgccagcggtggcgtgccccccgcattgatgggtatggggccagtacctgccacgcaaaaagcgttacaactggcggggctgcaactggcggatattgatctcattgaggctaatgaagcatttgctgcacagttccttgccgttgggaaaaacctgggctttgattctgagaaagtgaatgtcaacggcggggccatcgcgctcgggcatcctatcggtgccagtggtgctcgtattctggtcacactattacatgccatgcaggcacgcgataaaacgctggggctggcaacactgtgcattggcggcggtcagggaattgcgatggtgattgaacggttgaattaaacggaaggaggcagatatgatatggaaacggaaaatcaccctggaagcactgaatgctatgggtgaaggaaacatggtggggttcctggatattcgctttgaacatattggtgatgacacccttgaagcgacaatgccagtagactcgcggacaaagcagcctttcgggttgctgcatggaggagcatccgtggtactggccgaaagtatcggttccgttgccggttatttatgtaccgaaggtgagcaaaaagtggttggtctggaaatcaatgctaaccacgtccgctcggcacgagaagggcgggtgcgcggcgtatgcaaaccgttgcatctcggttcgcgtcaccaggtctggcagattgaaatcttcgatgagaaagggcgtttgtgctgttcgtcacgattgacgaccgccattttgtgactatcataaaaataagaagcctgcatttgcaggcttcttatttttat

SEQ ID NO: 42 - DNA, 19082 bp, artificial sequence
  plasmid SG661
aaggccagcaaaaggccaggaaccgtaaaaaggccgcgttgctggcgtttttccataggctccgcccccctgacgagcatcacaaaaatcgacgctcaagtcagaggtggcgaaacccgacaggactataaagataccaggcgtttccccctggaagctccctcgtgcgctctcctgttccgaccctgccgcttaccggatacctgtccgcctttctcccttcgggaagcgtggcgctttctcatagctcacgctgtaggtatctcagttcggtgtaggtcgttcgctccaagctgggctgtgtgcacgaaccccccgttcagcccgaccgctgcgccttatccggtaactatcgtcttgagtccaacccggtaagacacgacttatcgccactggcagcagccactggtaacaggattagcagagcgaggtatgtaggcggtgctacagagttcttgaagtggtggcctaactacggctacactagaagaacagtatttggtatctgcgctctgctgaagccagttaccttcggaaaaagagttggtagctcttgatccggcaaacaaaccaccgctggtagcggtggtttttttgtttgcaagcagcagattacgcgcagaaaaaaaggatctcaagaagatcctttgatcttttctacggggtctgacgctcagtggaacgaaaactcacgttaagggattttggtcatgagattatcaaaaaggatcttcacctagatccttttaaattaaaaatgaagttttaaatcaatctaaagtatatatgagtaaacttggtctgacagctcttcctttttcaatattattgaagcatttatcagggttattgtctcatgagcggatacatatttgaatgtatttagaaaaataaacaaataggggttccgcgcacatttccccgaaaagtgccacctgacggtcctgcatcagctcttatatattaagctaccaacttagtatataagccaaaacttaaatgtgctaccaacacatcaagccgttagagaactctatctatagcaatatttcaaatgtaccgacatacaagagaaacattaactatatatattcaatttatgagattatcttaacagatataaatgtaaattgcaataagtaagatttagaagtttatagcctttgtgtattggaagcagtacgcaaaggcttttttatttgataaaaattagaagtatatttattttttcataattaatttatgaaaatgaaagggggtgagcaaagtgacagaggaaagcagtatcttatcaaataacaaggtattagcaatatcattattgactttagcagtaaacattatgacttttatagtgcttgtagctaagtagtacgaaagggggagctttaaaaagctccttggaatacatagaattcataaattaatttatgaaaagaagggcgtatatgaaaacttgtaaaaattgcaaagagtttattaaagatactgaaatatgcaaaatacattcgttgatgattcatgataaaacagtagcaacctattgcagtaaatacaatgagtcaagatgtttacataaagggaaagtccaatgtattaattgttcaaagatgaaccgatatggatggtgtgccataaaaatgagatgttttacagaggaagaacagaaaaaagaacgtacatgcattaaatattatgcaaggagctttaaaaaagctcatgtaaagaagagtaaaaagaaaaaataatttatttattaatttaatattgagagtgccgacacagtatgcactaaaaaatatatctgtggtgtagtgagccgatacaaaaggatagtcactcgcattttcataatacatcttatgttatgattatgtgtcggtgggacttcacgacgaaaacccacaataaaaaaagagttcggggtagggttaagcatagttgaggcaactaaacaatcaagctaggatatgcagtagcagaccgtaaggtcgttgtttaggtgtgttgtaatacatacgctattaagatgtaaaaatacggataccaatgaagggaaaagtataatttttggatgtagtttgtttgttcatctatgggcaaactacgtccaaagccgtttccaaatctgctaaaaagtatatcctttctaaaatcaaagtcaagtatgaaatcataaataaagtttaattttgaagttattatgatattatgtttttctattaaaataaattaagtatatagaatagtttaataatagtatatacttaatgtgataagtgtctgacagtgtcacagaaaggatgattgttatggattataagcggccggccagtgggcaagttgaaaaattcacaaaaatgtggtataatatctttgttcattagagcgataaacttgaatttgagagggaacttagatggtatttgaaaaaattgataaaaatagttggaacagaaaagagtattttgaccactactttgcaagtgtaccttgtacctacagcatgaccgttaaagtggatatcacacaaataaaggaaaagggaatgaaactatatcctgcaatgctttattatattgcaatgattgtaaaccgccattcagagtttaggacggcaatcaatcaagatggtgaattggggatatatgatgagatgataccaagctatacaatatttcacaatgatactgaaacattttccagcctttggactgagtgtaagtctgactttaaatcatttttagcagattatgaaagtgatacgcaacggtatggaaacaatcatagaatggaaggaaagccaaatgctccggaaaacatttttaatgtatctatgataccgtggtcaaccttcgatggctttaatctgaatttgcagaaaggatatgattatttgattcctatttttactatggggaaatattataaagaagataacaaaattatacttcctttggcaattcaagttcatcacgcagtatgtgacggatttcacatttgccgttttgtaaacgaattgcaggaattgataaatagttaacttcaggtttgtctgtaactaaaaacaagtatttaagcaaaaacatcgtagaaatacggtgttttttgttaccctaagtttgttaagggatgcataaactgcatcccttaacttgtttttcgtgtacctattttttgtgaatcgattatgtcttttgcgcattcgtcgacaattgcatatattgataaaaataataatagtgggtataattaagttgttaggaggttagttagagtgaaaccagtaacgttatacgatgtcgcagagtatgccggtgtctcttatcagaccgtttcccgcgtggtgaaccaggccagccacgtttctgcgaaaacgcgggaaaaagtggaagcggcgatggcggagctgaattacattcccaaccgcgtggcacaacaactggcgggcaaacagtcgttgctgattggcgttgccacctccagtctggccctgcacgcgccgtcgcaaattgtcgcggcgattaaatctcgcgccgatcaactgggtgccagcgtggtggtgtcgatggtagaacgaagcggcgtcgaagcctgtaaagcggcggtgcacaatcttctcgcgcaacgcgtcagtgggctgatcattaactatccgctggatgaccaggatgccattgctgtggaagctgcctgcactaatgttccggcgttatttcttgatgtctctgaccagacacccatcaacagtattattttctcccatgaagacggtacgcgactgggcgtggagcatctggtcgcattgggtcaccagcaaatcgcgctgttagcgggcccattaagttctgtctcggcgcgtctgcgtctggctggctggcataaatatctcactcgcaatcaaattcagccgatagcggaacgggaaggcgactggagtgccatgtccggttttcaacaaaccatgcaaatgctgaatgagggcatcgttcccactgcgatgctggttgccaacgatcagatggcgctgggcgcaatgcgcgccattaccgagtccgggctgcgcgttggtgcggacatctcggtagtgggatacgacgataccgaagacagctcatgttatatcccgccgttaaccaccatcaaacaggattttcgcctgctggggcaaaccagcgtggaccgcttgctgcaactctctcagggccaggcggtgaagggcaatcagctgttgcccgtctcactggtgaaaagaaaaaccaccctggcgcccaatacgcaaaccgcctctccccgcgcgttggccgattcattaatgcagctggcacgacaggtttcccgactggaaagcgggcagtgagcgcaacgcaattaatgtaagttagctcactcattaggcaccgggatctcgaccgatgcccttgagagccttcaacccagtcagctccttccggtgggcgcggggcatgactagcatgatcgtgctcctgtcgttgaggacccggctaggctggcggggttgccttactggttagcagaatgaatcaccgatacgcggctcagctagcacccggaattgtgagcggataacaattccttggaattgtgagcggataacaattataattaagttgttaggaggttagaatgaaaaattgtgtcatcgtcagtgcggtacgtactgctatcggtagttttaacggttcactcgcttccaccagcgccatcgacctgggggcgacagtaattaaagccgccattgaacgtgcaaaaatcgattcacaacacgttgatgaagtgattatgggtaacgtgttacaagccgggctggggcaaaatccggcgcgtcaggcactgttaaaaagcgggctggcagaaacggtgtgcggattcacggtcaataaagtatgtggttcgggtcttaaaagtgtggcgcttgccgcccaggccattcaggcaggtcaggcgcagagcattgtggcggggggtatggaaaatatgagtttagccccctacttactcgatgcaaaagcacgctctggttatcgtcttggagacggacaggtttatgacgtaatcctgcgcgatggcctgatgtgcgccacccatggttatcatatggggattaccgccgaaaacgtggctaaagagtacggaattacccgtgaaatgcaggatgaactggcgctacattcacagcgtaaagcggcagccgcaattgagtccggtgcttttacagccgaaatcgtcccggtaaatgttgtcactcgaaagaaaaccttcgtcttcagtcaagacgaattcccgaaagcgaattcaacggctgaagcgttaggtgcattgcgcccggccttcgataaagcaggaacagtcaccgctgggaacgcgtctggtattaacgacggtgctgccgctctggtgattatggaagaatctgcggcgctggcagcaggccttacccccctggctcgcattaaaagttatgccagcggtggcgtgccccccgcattgatgggtatggggccagtacctgccacgcaaaaagcgttacaactggcggggctgcaactggcggatattgatctcattgaggctaatgaagcatttgctgcacagttccttgccgttgggaaaaacctgggctttgattctgagaaagtgaatgtcaacggcggggccatcgcgctcgggcatcctatcggtgccagtggtgctcgtattctggtcacactattacatgccatgcaggcacgcgataaaacgctggggctggcaacactgtgcattggcggcggtcagggaattgcgatggtgattgaacggttgaattaatagggaggtctgtttaatgaaaaaggtatgtgttataggtgcaggtactatgggttcaggaattgctcaggcatttgcagctaaaggatttgaagtagtattaagagatattaaagatgaatttgttgatagaggattagattttatcaataaaaatctttctaaattagttaaaaaaggaaagatagaagaagctactaaagttgaaatcttaactagaatttccggaacagttgaccttaatatggcagctgattgcgatttagttatagaagcagctgttgaaagaatggatattaaaaagcagatttttgctgacttagacaatatatgcaagccagaaacaattcttgcatcaaatacatcatcactttcaataacagaagtggcatcagcaactaaaagacctgataaggttataggtatgcatttctttaatccagctcctgttatgaagcttgtagaggtaataagaggaatagctacatcacaagaaacttttgatgcagttaaagagacatctatagcaataggaaaagatcctgtagaagtagcagaagcaccaggatttgttgtaaatagaatattaataccaatgattaatgaagcagttggtatattagcagaaggaatagcttcagtagaagacatagataaagctatgaaacttggagctaatcacccaatgggaccattagaattaggtgattttataggtcttgatatatgtcttgctataatggatgttttatactcagaaactggagattctaagtatagaccacatacattacttaagaagtatgtaagagcaggatggcttggaagaaaatcaggaaaaggtttctacgattattcaaaataagtttacaagaatccctttaggaggattagtcatggaactaaacaatgtcatccttgaaaaggaaggtaaagttgctgtagttaccattaacagacctaaagcattaaatgcgttaaatagtgatacactaaaagaaatggattatgttataggtgaaattgaaaatgatagcgaagtacttgcagtaattttaactggagcaggagaaaaatcatttgtagcaggagcagatatttctgagatgaaggaaatgaataccattgaaggtagaaaattcgggatacttggaaataaagtgtttagaagattagaacttcttgaaaagcctgtaatagcagctgttaatggttttgctttaggaggcggatgcgaaatagctatgtcttgtgatataagaatagcttcaagcaacgcaagatttggtcaaccagaagtaggtctcggaataacacctggttttggtggtacacaaagactttcaagattagttggaatgggcatggcaaagcagcttatatttactgcacaaaatataaaggcagatgaagcattaagaatcggacttgtaaataaggtagtagaacctagtgaattaatgaatacagcaaaagaaattgcaaacaaaattgtgagcaatgctccagtagctgttaagttaagcaaacaggctattaatagaggaatgcagtgtgatattgatactgctttagcatttgaatcagaagcatttggagaatgcttttcaacagaggatcaaaaggatgcaatgacagctttcatagagaaaagaaaaattgaaggcttcaaaaatagataggaggtaagtttataggaggaattccatatgatatggaaacggaaaatcaccctggaagcactgaatgctatgggtgaaggaaacatggtggggttcctggatattcgctttgaacatattggtgatgacacccttgaagcgacaatgccagtagactcgcggacaaagcagcctttcgggttgctgcatggaggagcatccgtggtactggccgaaagtatcggttccgttgccggttatttatgtaccgaaggtgagcaaaaagtggttggtctggaaatcaatgctaaccacgtccgctcggcacgagaagggcgggtgcgcggcgtatgcaaaccgttgcatctcggttcgcgtcaccaggtctggcagattgaaatcttcgatgagaaagggcgtttgtgctgttcgtcacgattgacgaccgccattttgtgaatttacacgatcgacgtgctcagctagcacccggaattgtgagcggataacaattccttggaattgtgagcggataacaattataattaagttgttaggaggttagaatgagtctgaatttccttgattttgaacagccgattgcagagctggaagcgaaaatcgattctctgactgcggttagccgtcaggatgagaaactggatattaacatcgatgaagaagtgcatcgtctgcgtgaaaaaagcgtagaactgacacgtaaaatcttcgccgatctcggtgcatggcagattgcgcaactggcacgccatccacagcgtccttataccctggattacgttcgcctggcatttgatgaatttgacgaactggctggcgaccgcgcgtatgcagacgataaagctatcgtcggtggtatcgcccgtctcgatggtcgtccggtgatgatcattggtcatcaaaaaggtcgtgaaaccaaagaaaaaattcgccgtaactttggtatgccagcgccagaaggttaccgcaaagcactgcgtctgatgcaaatggctgaacgctttaagatgccaatcatcacctttatcgacaccccgggggcttatccgggcgtgggcgcagaagagcgcggtcagtctgaagccattgcacgcaacctgcgtgaaatgtctcgccttagcgtaccgactatttgtaccgttatcggtgaaggtggttctggcggcgcgctggcgattggcgtgggcgataaagtgaatatgctgcaatacagcacctattccgttatctcgccggaaggttgtgcgtccattctgtggaagagcgctgataaagcgccgctggcggctgaagcgatgggtatcatcgctccgcgtctgaaagaactaaaactgatcgactccatcatcccagaaccgctgggtggtgctcaccgtaacccggaagcgatggcggcatcgttgaaagcgcaactgttggcggatctggccgatctcgacgtgttaagcactgaagatttaaaaaatcgtcgttatcagcgcctgatgagctacggttacgcgtaataaggaggaacccactcatggatattcgtaagattaaaaaactgatcgagctggttgaagaatcaggcatctccgaactggaaatttctgaaggcgaagagtcagtacgcattagccgtgcagctcctgccgcaagtttccctgtgatgcaacaagcttacgctgcaccaatgatgcagcagccagctcaatctaacgcagccgctccggcgaccgttccttccatggaagcgccagcagcagcggaaatcagtggtcacatcgtacgttccccgatggttggtactttctaccgcaccccaagcccggacgcaaaagcgttcatcgaagtgggtcagaaagtcaacgtgggcgataccctgtgcatcgttgaagccatgaaaatgatgaaccagatcgaagcggacaaatccggtaccgtgaaagcaattctggtcgaaagtggacaaccggtagaatttgacgagccgctggtcgtcatcgagtaacgaggcgaacatgctggataaaattgttattgccaaccgcggcgagattgcattgcgtattcttcgtgcctgtaaagaactgggcatcaagactgtcgctgtgcactccagcgcggatcgcgatctaaaacacgtattactggcagatgaaacggtctgtattggccctgctccgtcagtaaaaagttatctgaacatcccggcaatcatcagcgccgctgaaatcaccggcgcagtagcaatccatccgggttacggcttcctctccgagaacgccaactttgccgagcaggttgaacgctccggctttatcttcattggcccgaaagcagaaaccattcgcctgatgggcgacaaagtatccgcaatcgcggcgatgaaaaaagcgggcgtcccttgcgtaccgggttctgacggcccgctgggcgacgatatggataaaaaccgtgccattgctaaacgcattggttatccggtgattatcaaagcctccggcggcggcggcggtcgcggtatgcgcgtagtgcgcggcgacgctgaactggcacaatccatctccatgacccgtgcggaagcgaaagctgctttcagcaacgatatggtttacatggagaaatacctggaaaatcctcgccacgtcgagattcaggtactggctgacggtcagggcaacgctatctatctggcggaacgtgactgctccatgcaacgccgccaccagaaagtggtcgaagaagcgccagcaccgggcattaccccggaactgcgtcgctacatcggcgaacgttgcgctaaagcgtgtgttgatatcggctatcgcggtgcaggtactttcgagttcctgttcgaaaacggcgagttctatttcatcgaaatgaacacccgtattcaggtagaacacccggttacagaaatgatcaccggcgttgacctgatcaaagaacagctgcgtatcgctgccggtcaaccgctgtcgatcaagcaagaagaagttcacgttcgcggccatgcggtggaatgtcgtatcaacgccgaagatccgaacaccttcctgccaagtccgggcaaaatcacccgtttccacgcacctggcggttttggcgtacgttgggagtctcatatctacgcgggctacaccgtaccgccgtactatgactcaatgatcggtaagctgatttgctacggtgaaaaccgtgacgtggcgattgcccgcatgaagaatgcgctgcaggagctgatcatcgacggtatcaaaaccaacgttgatctgcagatccgcatcatgaatgacgagaacttccagcatggtggcactaacatccactatctggagaaaaaactcggtcttcaggaaaaataatataggaggatataacatgagctggattgaacgaattaaaagcaacattactcccacccgcaaggcgagcattcctgaaggggtgtggactaagtgtgatagctgcggtcaggttttataccgcgctgagctggaacgtaatcttgaggtctgtccgaagtgtgaccatcacatgcgtatgacagcgcgtaatcgcctgcatagcctgttagatgaaggaagccttgtggagctgggtagcgagcttgagccgaaagatgtgctgaagtttcgtgactccaagaagtataaagaccgtctggcatctgcgcagaaagaaaccggcgaaaaagatgcgctggtggtgatgaaaggcactctgtatggaatgccggttgtcgctgcggcattcgagttcgcctttatgggcggttcaatggggtctgttgtgggtgcacgtttcgtgcgtgccgttgagcaggcgctggaagataactgcccgctgatctgcttctccgcctctggtggcgcacgtatgcaggaagcactgatgtcgctgatgcagatggcgaaaacctctgcggcactggcaaaaatgcaggagcgcggcttgccgtacatctccgtgctgaccgacccgacgatgggcggtgtttctgcaagtttcgccatgctgggcgatctcaacatcgctgaaccgaaagcgttaatcggctttgccggtccgcgtgttatcgaacagaccgttcgcgaaaaactgccgcctggattccagcgcagtgaattcctgatcgagaaaggcgcgatcgacatgatcgtccgtcgtccggaaatgcgcctgaaactggcgagtattctggcgaagttgatgaatctgccagcgccgaatcctgaagcgccgcgtgaaggcgtagtggtacccccggtaccggatcaggaacctgaggcctgagactaggaggatcttaaatgaccgacgtccgattccgcattatcggtacgggtgcctacgtaccggaacggatcgtctccaacgatgaagtcggcgcgccggccggggtggacgacgactggatcacccgcaagaccggtatccggcagcgtcgctgggccgccgacgaccaggccacctcggacctggccacggccgcggggcgggcagcgctgaaagcggcgggcatcacgcccgagcagctgaccgtgatcgcggtcgccacctccacgccggaccggccgcagccgcccacggcggcctatgtccagcaccacctcggtgcgaccggcactgcggcgttcgacgtcaacgcggtctgctccggcaccgtgttcgcgctgtcctcggtggcgggcaccctcgtgtaccggggcggttacgcgctggtcatcggcgcggacctgtactcgcgcatcctcaacccggccgaccgcaagacggtcgtgctgttcggggacggcgccggcgcaatggtcctcgggccgacctcgaccggcacgggccccatcgtccggcgcgtcgccctgcacaccttcggcggcctcaccgacctgatccgtgtgcccgcgggcggcagccgccagccgctggacacggatggcctcgacgcgggactgcagtacttcgcgatggacgggcgtgaggtgcgccgcttcgtcacggagcacctgccgcagctgatcaagggcttcctgcacgaggccggggtcgacgccgccgacatcagccacttcgtgccgcatcaggccaacggtgtcatgctcgacgaggtcttcggcgagctgcatctgccgcgggcgaccatgcaccggacggtcgagacctacggcaacacgggagcggcctccatcccgatcaccatggacgcggccgtgcgcgccggttccttccggccgggcgagctggtcctgctggccgggttcggcggcggcatggccgcgagcttcgccctgatcgagtggtaggctcagctagcacccggaattgtgagcggataacaattccttggaattgtgagcggataacaattataattaagttgttaggaggttagaatgactcagcgcattgcgtatgtgaccggcggcatgggtggtatcggaaccgccatttgccagcggctggccaaggatggctttcgtgtggtggccggttgcggccccaactcgccgcgccgcgaaaagtggctggagcagcagaaggccctgggcttcgatttcattgcctcggaaggcaatgtggctgactgggactcgaccaagaccgcattcgacaaggtcaagtccgaggtcggcgaggttgatgtgctgatcaacaacgccggtatcacccgcgacgtggtgttccgcaagatgacccgcgccgactgggatgcggtgatcgacaccaacctgacctcgctgttcaacgtcaccaagcaggtgatcgacggcatggccgaccgtggctggggccgcatcgtcaacatctcgtcggtgaacgggcagaagggccagttcggccagaccaactactccaccgccaaggccggcctgcatggcttcaccatggcactggcgcaggaagtggcgaccaagggcgtgaccgtcaacacggtctctccgggctatatcgccaccgacatggtcaaggcgatccgccaggacgtgctcgacaagatcgtcgcgacgatcccggtcaagcgcctgggcctgccggaagagatcgcctcgatctgcgcctggttgtcgtcggaggagtccggtttctcgaccggcgccgacttctcgctcaacggcggcctgcatatgggctgaacaggaggcaataaatgagcgcacaatccctggaagtaggccagaaggcccgtctcagcaagcggttcggggcggcggaggtagccgccttcgccgcgctctcggaggacttcaaccccctgcacctggacccggccttcgccgccaccacggcgttcgagcggcccatagtccacggcatgctgctcgccagcctcttctccgggctgctgggccagcagttgccgggcaaggggagcatctatctgggtcaaagcctcagcttcaagctgccggtctttgtcggggacgaggtgacggccgaggtggaggtgaccgcccttcgcgaggacaagcccatcgccaccctgaccacccgcatcttcacccaaggcggcgccctcgccgtgacgggggaagccgtggtcaagctgccttaagttgaggaggtagataatgtctacaacacataacgtccctcagggcgatcttgttttacgtactttagccatgcccgccgataccaatgccaatggtgacatctttggtggttggttaatgtcacaaatggatattggcggcgctattctggcaaaagaaattgcccacggtcgcgtagtgactgtgcgggttgaaggaatgactttcttacggccggttgcggtcggcgatgtggtgtgctgctatgcacgctgtgtccagaaagggacgacatcggtcagcattaatattgaagtgtgggtgaaaaaagtagcgtctgaaccaatcgggcaacggtataaagcgacagaagcattatttaagtatgtcgcggttgatcctgaaggaaaacctcgcgccttacctgttgagtaaagcgactgacgtaggaggatatcaatgaaagttacaaatcaaaaagaactaaaacaaaagctaaatgaattgagagaagcgcaaaagaagtttgcaacctatactcaagagcaagttgataaaatttttaaacaatgtgccatagccgcagctaaagaaagaataaacttagctaaattagcagtagaagaaacaggaataggtcttgtagaagataaaattataaaaaatcattttgcagcagaatatatatacaataaatataaaaatgaaaaaacttgtggcataatagaccatgacgattctttaggcataacaaaggttgctgaaccaattggaattgttgcagccatagttcctactactaatccaacttccacagcaattttcaaatcattaatttctttaaaaacaagaaacgcaatattcttttcaccacatccacgtgcaaaaaaatctacaattgctgcagcaaaattaattttagatgcagctgttaaagcaggagcacctaaaaatataataggctggatagatgagccatcaatagaactttctcaagatttgatgagtgaagctgatataatattagcaacaggaggtccttcaatggttaaagcggcctattcatctggaaaacctgcaattggtgttggagcaggaaatacaccagcaataatagatgagagtgcagatatagatatggcagtaagctccataattttatcaaagacttatgacaatggagtaatatgcgcttctgaacaatcaatattagttatgaattcaatatacgaaaaagttaaagaggaatttgtaaaacgaggatcatatatactcaatcaaaatgaaatagctaaaataaaagaaactatgtttaaaaatggagctattaatgctgacatagttggaaaatctgcttatataattgctaaaatggcaggaattgaagttcctcaaactacaaagatacttataggcgaagtacaatctgttgaaaaaagcgagctgttctcacatgaaaaactatcaccagtacttgcaatgtataaagttaaggattttgatgaagctctaaaaaaggcacaaaggctaatagaattaggtggaagtggacacacgtcatctttatatatagattcacaaaacaataaggataaagttaaagaatttggattagcaatgaaaacttcaaggacatttattaacatgccttcttcacagggagcaagcggagatttatacaattttgcgatagcaccatcatttactcttggatgcggcacttggggaggaaactctgtatcgcaaaatgtagagcctaaacatttattaaatattaaaagtgttgctgaaagaagggaaaatatgctttggtttaaagtgccacaaaaaatatattttaaatatggatgtcttagatttgcattaaaagaattaaaagatatgaataagaaaagagcctttatagtaacagataaagatctttttaaacttggatatgttaataaaataacaaaggtactagatgagatagatattaaatacagtatatttacagatattaaatctgatccaactattgattcagtaaaaaaaggtgctaaagaaatgcttaactttgaacctgatactataatctctattggtggtggatcgccaatggatgcagcaaaggttatgcacttgttatatgaatatccagaagcagaaattgaaaatctagctataaactttatggatataagaaagagaatatgcaatttccctaaattaggtacaaaggcgatttcagtagctattcctacaactgctggtaccggttcagaggcaacaccttttgcagttataactaatgatgaaacaggaatgaaataccctttaacttcttatgaattgaccccaaacatggcaataatagatactgaattaatgttaaatatgcctagaaaattaacagcagcaactggaatagatgcattagttcatgctatagaagcatatgtttcggttatggctacggattatactgatgaattagccttaagagcaataaaaatgatatttaaatatttgcctagagcctataaaaatgggactaacgacattgaagcaagagaaaaaatggcacatgcctctaatattgcggggatggcatttgcaaatgctttcttaggtgtatgccattcaatggctcataaacttggggcaatgcatcacgttccacatggaattgcttgtgctgtattaatagaagaagttattaaatataacgctacagactgtccaacaaagcaaacagcattccctcaatataaatctcctaatgctaagagaaaatatgctgaaattgcagagtatttgaatttaaagggtactagcgataccgaaaaggtaacagccttaatagaagctatttcaaagttaaagatagatttgagtattccacaaaatataagtgccgctggaataaataaaaaagatttttataatacgctagataaaatgtcagagcttgcttttgatgaccaatgtacaacagctaatcctaggtatccacttataagtgaacttaaggatatctatataaaatcattttaaatgctaaaggaggagacaatgagcaatatggaatcgacccgcatgctgcggcagccgatacagttgttgcaggggcacaagggaccggtcacggcctcgcgccaccgccgcaatgccgtggtgtatgcactgctgtgcctgctggcgctgctaccggtggccaccggccagtcggcggcgtggcaggccgccgggctggggctgttcatgcccggcgccggtttcctggcgctgggtggcgcctgggcgttgctgttcccgctgacggtgttcgtcttctggctggcggtcattgcctggttctggtcgggcatggtggtggcgccgctgaccctctggctgggcaccgccgcgctggccggctggctggcgggcgaggcgatctggccgccggcggtgtatctggcgccggccgccgccgccgccaccttcctgttcttccagtatcgcggcgccaagcggcgggccaaggaccgcgagcacttcaagttccgccaaagtttcttcgccgagtcgctggcggaggtgcaccagcgcgccgccaccgaaccggagccgggcgagcgcgaactgacgccggaccagttgcagggcgtgcgctacctgctcgagctggccttgcagccggtcggccagtacaagggctacaccatcatcgaccagttccagccggccgccctgcgctaccagctcaaccacatcggcttcgcgctgggcatggtgcaagggcattacacgcccaacttccagggctatctgggccaggcgcagcgcaacgtgatcgacacttaccgcgagcgcaaggtgtggggctactgggtgtacgagtcgatgtgggggcatttcaacttctccgacttcgatcccgcccgcaaggacaacatcatgctcaccggctggtacggcatgcatgtgggccagtacatgctcaatgccggcgacacccgctacagccagcccggcagcctgagcttccgcctcaacgacaagacctgctaccaccacgacatccattccatcaaccagtcggtgcgcgagaacttccagagttcggacttctgcctgtatccgtgcgagccgaactgggtgtacccggtctgcaacatgtacggcatgtcctcgctggcggtgtatgacacgctgttcgagcgccgcgacaccgcccaggtgctgcccaagtggctgcacatgctggacaccgagttcaccgaccagaaaggctcgctggtcggcttgcgctcatactggaccgggctggaaatgccgttctacaccggcgaggcgggcttcgccttcttcgccaacatcttctcgaccgatctggcgcgcaagctgtgggcggtggggcgcaaggaattgtcgatgtgcctgacgcaggacgccgagggccagacgcggctgactctgccgaaggaggcgctggccttcttcgacaccatcgacgccggcaactaccggccgggcaagctgttcgcctatgtggcggtgcagatgtgcgcgcgcgagttcggcgacgacgaactggccgaggcggcacgccgctcgatggaccaggattgcggcccggtggtcgagaacggcgtggcgcgctacaccaagggctcgacgctggccaacatctggggcgtggagggacggctgatgcgcaccggcgatttccgcaacagcttcgtcaaggggccgccgtcgtcggtgttcgacggtccgctgctgggtgatgcgcgctatccggaaatcctggtggcgaaggccttcagccgtggcgacgacctggaactggtgctgtacccgggggccggcgacgggccgcagacgctgggcttcgaacgcctcaagcccggcgtccgctatgtggtcgagggcgccgccagtggtgagttcaccgccgacgcggatggccgtgcgtcgctcgcggtcacgctcagcgggcgcactgcgctgcacatcaagccgggccactgatactatcataaaaataagaagcctgcatttgcaggcttcttatttttat

SEQ ID NO: 43 - DNA, 24921 bp, artificial sequence
  plasmid SG696
aaggccagcaaaaggccaggaaccgtaaaaaggccgcgttgctggcgtttttccataggctccgcccccctgacgagcatcacaaaaatcgacgctcaagtcagaggtggcgaaacccgacaggactataaagataccaggcgtttccccctggaagctccctcgtgcgctctcctgttccgaccctgccgcttaccggatacctgtccgcctttctcccttcgggaagcgtggcgctttctcatagctcacgctgtaggtatctcagttcggtgtaggtcgttcgctccaagctgggctgtgtgcacgaaccccccgttcagcccgaccgctgcgccttatccggtaactatcgtcttgagtccaacccggtaagacacgacttatcgccactggcagcagccactggtaacaggattagcagagcgaggtatgtaggcggtgctacagagttcttgaagtggtggcctaactacggctacactagaagaacagtatttggtatctgcgctctgctgaagccagttaccttcggaaaaagagttggtagctcttgatccggcaaacaaaccaccgctggtagcggtggtttttttgtttgcaagcagcagattacgcgcagaaaaaaaggatctcaagaagatcctttgatcttttctacggggtctgacgctcagtggaacgaaaactcacgttaagggattttggtcatgagattatcaaaaaggatcttcacctagatccttttaaattaaaaatgaagttttaaatcaatctaaagtatatatgagtaaacttggtctgacagctcttcctttttcaatattattgaagcatttatcagggttattgtctcatgagcggatacatatttgaatgtatttagaaaaataaacaaataggggttccgcgcacatttccccgaaaagtgccacctgacggtcctgcatcagctcttatatattaagctaccaacttagtatataagccaaaacttaaatgtgctaccaacacatcaagccgttagagaactctatctatagcaatatttcaaatgtaccgacatacaagagaaacattaactatatatattcaatttatgagattatcttaacagatataaatgtaaattgcaataagtaagatttagaagtttatagcctttgtgtattggaagcagtacgcaaaggcttttttatttgataaaaattagaagtatatttattttttcataattaatttatgaaaatgaaagggggtgagcaaagtgacagaggaaagcagtatcttatcaaataacaaggtattagcaatatcattattgactttagcagtaaacattatgacttttatagtgcttgtagctaagtagtacgaaagggggagctttaaaaagctccttggaatacatagaattcataaattaatttatgaaaagaagggcgtatatgaaaacttgtaaaaattgcaaagagtttattaaagatactgaaatatgcaaaatacattcgttgatgattcatgataaaacagtagcaacctattgcagtaaatacaatgagtcaagatgtttacataaagggaaagtccaatgtattaattgttcaaagatgaaccgatatggatggtgtgccataaaaatgagatgttttacagaggaagaacagaaaaaagaacgtacatgcattaaatattatgcaaggagctttaaaaaagctcatgtaaagaagagtaaaaagaaaaaataatttatttattaatttaatattgagagtgccgacacagtatgcactaaaaaatatatctgtggtgtagtgagccgatacaaaaggatagtcactcgcattttcataatacatcttatgttatgattatgtgtcggtgggacttcacgacgaaaacccacaataaaaaaagagttcggggtagggttaagcatagttgaggcaactaaacaatcaagctaggatatgcagtagcagaccgtaaggtcgttgtttaggtgtgttgtaatacatacgctattaagatgtaaaaatacggataccaatgaagggaaaagtataatttttggatgtagtttgtttgttcatctatgggcaaactacgtccaaagccgtttccaaatctgctaaaaagtatatcctttctaaaatcaaagtcaagtatgaaatcataaataaagtttaattttgaagttattatgatattatgtttttctattaaaataaattaagtatatagaatagtttaataatagtatatacttaatgtgataagtgtctgacagtgtcacagaaaggatgattgttatggattataagcggccggccagtgggcaagttgaaaaattcacaaaaatgtggtataatatctttgttcattagagcgataaacttgaatttgagagggaacttagatggtatttgaaaaaattgataaaaatagttggaacagaaaagagtattttgaccactactttgcaagtgtaccttgtacctacagcatgaccgttaaagtggatatcacacaaataaaggaaaagggaatgaaactatatcctgcaatgctttattatattgcaatgattgtaaaccgccattcagagtttaggacggcaatcaatcaagatggtgaattggggatatatgatgagatgataccaagctatacaatatttcacaatgatactgaaacattttccagcctttggactgagtgtaagtctgactttaaatcatttttagcagattatgaaagtgatacgcaacggtatggaaacaatcatagaatggaaggaaagccaaatgctccggaaaacatttttaatgtatctatgataccgtggtcaaccttcgatggctttaatctgaatttgcagaaaggatatgattatttgattcctatttttactatggggaaatattataaagaagataacaaaattatacttcctttggcaattcaagttcatcacgcagtatgtgacggatttcacatttgccgttttgtaaacgaattgcaggaattgataaatagttaacttcaggtttgtctgtaactaaaaacaagtatttaagcaaaaacatcgtagaaatacggtgttttttgttaccctaagtttgttaagggatgcataaactgcatcccttaacttgtttttcgtgtacctattttttgtgaatcgattatgtcttttgcgcattcgtcgacaattgcatatattgataaaaataataatagtgggtataattaagttgttaggaggttagttagagtgaaaccagtaacgttatacgatgtcgcagagtatgccggtgtctcttatcagaccgtttcccgcgtggtgaaccaggccagccacgtttctgcgaaaacgcgggaaaaagtggaagcggcgatggcggagctgaattacattcccaaccgcgtggcacaacaactggcgggcaaacagtcgttgctgattggcgttgccacctccagtctggccctgcacgcgccgtcgcaaattgtcgcggcgattaaatctcgcgccgatcaactgggtgccagcgtggtggtgtcgatggtagaacgaagcggcgtcgaagcctgtaaagcggcggtgcacaatcttctcgcgcaacgcgtcagtgggctgatcattaactatccgctggatgaccaggatgccattgctgtggaagctgcctgcactaatgttccggcgttatttcttgatgtctctgaccagacacccatcaacagtattattttctcccatgaagacggtacgcgactgggcgtggagcatctggtcgcattgggtcaccagcaaatcgcgctgttagcgggcccattaagttctgtctcggcgcgtctgcgtctggctggctggcataaatatctcactcgcaatcaaattcagccgatagcggaacgggaaggcgactggagtgccatgtccggttttcaacaaaccatgcaaatgctgaatgagggcatcgttcccactgcgatgctggttgccaacgatcagatggcgctgggcgcaatgcgcgccattaccgagtccgggctgcgcgttggtgcggacatctcggtagtgggatacgacgataccgaagacagctcatgttatatcccgccgttaaccaccatcaaacaggattttcgcctgctggggcaaaccagcgtggaccgcttgctgcaactctctcagggccaggcggtgaagggcaatcagctgttgcccgtctcactggtgaaaagaaaaaccaccctggcgcccaatacgcaaaccgcctctccccgcgcgttggccgattcattaatgcagctggcacgacaggtttcccgactggaaagcgggcagtgagcgcaacgcaattaatgtaagttagctcactcattaggcaccgggatctcgaccgatgcccttgagagccttcaacccagtcagctccttccggtgggcgcggggcatgactagcatgatcgtgctcctgtcgttgaggacccggctaggctggcggggttgccttactggttagcagaatgaatcaccgatacgcggctcagctagcacccggaattgtgagcggataacaattccttggaattgtgagcggataacaattataattaagttgttaggaggttagaatgaaggtaactaatgttgaagaactgatgaaaaaaatgcaggaagtgcaaaatgctcaaaaaaaatttgggagttttactcaggaacaagtagatgaaattttcaggcaagcagcactagcagctaacagtgccagaatagatctagctaaaatggcagtggaagaaactaaaatgggaattgtagaggataaggttataaaaaatcattttgttgcagaatacatatataataagtataaaaatgaaaaaacttgtgggattttggaagaagatgaaggctttggaatggttaaaattgcagaacctgtaggtgtgattgcagcagtaattccaacaacaaatccaacatctacagcaatatttaaagcattattagctttgaaaacaagaaatggtataattttttcaccacatccaagagcaaaaaagtgtactattgcagcagctaagttagttcttgatgctgcagttaaagcaggtgctcctaaaggaattataggttggatagatgaaccttctattgaactttcacagatagtaatgaaagaagctgatataatccttgcaacaggtggtccaggtatggttaaagcagcttattcttcaggtaaacctgctataggggttggtcctggtaacacacctgctttaattgatgaaagtgctgatattaaaatggcagtaaattcaatacttctttccaaaacttttgataatggtatgatttgtgcttcagagcagtcggtagtagttgtagattcaatatatgaagaagttaagaaagaatttgctcatagaggagcttatattttaagtaaggatgaaacaactaaagttggaaaaatactcttagttaatggtacattaaatgctggtatcgttggtcagagtgcttataaaatagcagaaatggcaggagttaaagttccagaagatgctaaagttcttataggagaagtaaaatcagtggagcattcagaagagccattttcacatgaaaagttatctccagttttagctatgtatagagctaaaaattttgatgaagctcttttaaaagctggaagattagttgaactcggtggaatgggtcatacatctgtattatatgtaaatgcaataactgaaaaagtaaaagtagaaaaatttagagaaactatgaagactggtagaacattaataaatatgccttcagcacaaggtgctataggagacatatataactttaaactagctccttcattaacattaggttgtggttcatggggaggaaactccgtatcagaaaatgttggacctaaacacttattaaatataaaaagtgttgctgagaggagagaaaatatgctttggtttagagttcctgaaaaggtttattttaaatatggtagtcttggagttgcattaaaagaattagatattttggataagaaaaaagtatttatagtaacagataaagttctttatcaattaggttatatagatagagttacaaagattcttgaagaattgaaaatttcatataaaatatttacagatgtagaaccagatccaaccctagctacagctaaaaaaggtgcagaagaattgttatcatttaatccagatactattatagcagttggtggtggttcagcaatggatgctgctaagattatgtgggtaatgtatgaacatccggaagtaagatttgaagatttagctatgagatttatggatataagaaagagagtatatacttttcctaagatgggtgaaaaagcaatgatgatttctgttgcaacatcagcaggaacaggatcagaagtaacaccttttgcagtaattactgatgaaaaaacaggagctaaatatccattagctgattatgaattaactccaaatatggctataattgatgctgaacttatgatgggtatgccaaaaggattaacagcagcttcaggaatagatgcactaactcatgcaatagaagcttatgtatcaataatggcttcagaatatactaatggattagcgttagaagcaataagattgatatttaagtatttaccaatagcttacagtgaaggaacaacaagtataaaggcaagagaaaaaatggcgcatgcttcaacaatagctggtatggcatttgctaatgcatttttaggagtatgtcattcaatggcacataaattaggatcaactcatcacgtaccacatggcattgccaatgcactacttataaatgaagttataaaatttaatgcagtagaaaatccaagaaaacaagctgcatttccacaatataagtatccaaatataaaaaagagatatgctagaatagcagattaccttaacttaggtgggtcaacagacgatgaaaaagtacaattattaataaatgctatagatgaattaaaagctaagataaatattccagaaagtattaaagaagcaggagtaacagaagaaaaattttatgctactttagataaaatgtcagaattagcttttgatgatcaatgtacaggtgcaaaccctagatatccattaataagtgaaataaaacaaatgtatgtaaatgcatttatgactaggaggatcgataatgagcgcacccaccatcgaatccgagcagtcgacagacatcggctacgtgttcgaggttccggatcggccgaacggcccggccgttcgccgactactgcggcgcagcggcgcactgctgggagccgtcgggacggtggccacgctgaccgcgtggcgcagcaaacggccacgggttcgggcgatagcgctcggactgctggccccgggcggcggtcagctctatacccgcagcccgttgcgattcgtggccacggtcgccggcttcttcgcatcgctggtcgcgtggttcggcagcggcaacatcatcgccccggtcctggtgtggctgacggcggcgaccaacgccggcagtcacgccgccggcggccggaggacctggaacggtgcacgccgggtgattccgacggcggtggcgggggccgccgccgccggaatagtggcccgacgccgggcctttcacgccgcgcaggcccgtgggagaactcgtgccgagtatctgacgacagcgcctcgtctggacccgcagccgaaagatgcggcatccgaggaactgtcgcccaccgatctcgcggtcctgcgctcgctgctggaccgggcgctgcagcccctggagaatttcgacgggttcgaccgtatcgaccagttccagacttcggcgatgcgctaccagtgcaacttcatgcagtacgcgctggccacagcacaactgcacgccacgccgtcgttccacggttatctgtcggccgcacaacgcaatctgatcgacaagctcacgctgccggcggtgtggcgctactgggccttcgaacagacctggggcaatctcagtctggactgggacccgatgaaacgcgacaacatcatgctctcgggatacctaggcatgatgctgggtgcctacgaatccaacaccggcgacgaccgttaccgccgcagtggggcgttgcccttccggttggggaaacgcgactggccctacacccacgacatggtgagtgctgccgtgcacgacaacatgcagcgctccggtatgacgctgttcccctgcgaaccgaactggatctacagcgcctgcaacatgccggcgatcagctcgctgatgatgtccgaccgcctgcacggcacccggtacatcgaatcggtcggcgaggactttcgacgccggctgcacggcgaattcattactcccgatggccgtatcaccgcaatacggtcctcgcggctgggcgtgaccatcccgatgctcacctccacaatggccgactgcggcctggcgtccatgctgcacgcattcgatccggaactggcacagcggtgctggaccatcgcccgtcgtgagttcattgacacgactgggcccgaaccggtcatcgtgctgcgggggtgggacgcgatcgataccggcaactaccgtaagacgacgttgggcgccgtcgcacccgtcatgtgggcggccgccgagatgggcgacacagatctggtcgcccagctgaccaccacgttggagcggcatgcacagcccaccgagaccggcggagcccgctggtacgccgagctgtcgaccaatatgaacgcgatggcggccctggcgcgattcaacccgcccggtggccagcgggcgctgatcagtgccggacccggcacgcagatcctgaccggaccggtgctcgacgacgtcgtgtacccagaggtcctggtggcgtcggcacgcaccgatggagccgacctgcggctggtactgcggcccggggctggtgccgcacgcgtgagcatcggagtgcgacacctgcatcccggcggccgctaccgggtgaacggcgccgtcgacagcgaggtgaccgccgacaaccagggccgcagtcacctggaggtcgacctgatcgaccgcaccgaagtctccctgacaccggcgccatgaagtacgataggaggatcactatgtatgattttgtgattattggcggtggcatcatcggcatgtcgaccgccatgcaactgattgatgtctacccggacgcccgcattgcgttgctggaaaaagagtccggcccggcctgtcaccagacgggccacaacagcggcgtgatccatgccggggtttattacacgcccggtagcctgaaggcacagttttgcctggcgggaaaccgcgccactaaagccttttgcgatcaaaacggcattcgctatgacaactgcggcaagatgctggtcgccacctctgaactcgaaatggaacggatgcgcgcgttgtgggaacgcacggcggcaaacggtatcgagcgcgagtggttaaacgccgatgaactgcgcgagcgcgaaccgaatatcaccgggcttggcggtatttttgtgccgtccagcggcattgtcagctaccgcgaagtaacggcggcgatggcaaaaattttccaggccagaggcggcgagattatctataacgccgaagtcagcggcctcagtgagcataaaaacggcgtggtgatacgtacccgccagggcggcgaatatgaagcatcgacgctgattagctgttccgggctgatggctgaccggctggtgaaaatgctcggactcgaaccgggctttatcatctgcccgttccgtggtgagtatttccgccttgcgccggagcataaccagattgttaaccacctgatttaccccattcccgaccccgcgatgccatttttgggcgtgcatctcacccgaatgatcgatggcagcgtgaccgtcgggccaaacgcggtgctggcttttaaacgcgaaggctaccacaagcgcgacttctcgtttagcgacacgctggaaattttgggctcgtcggggattcgccgggtgctgcaaaaccatctacgctcaggactgggcgagatgaaaaactcgctgtgcaaaagcggctatctgcggctggtgcaaaagtattgtccccggctttcgttaagcgatctccagccctggcccgccggtgtgcgggcgcaggcggtatcgccggacggcaagctgattgacgattttctgtttgtcaccaccccgcgcacgatccacacctgcaatgcgccctccccggcagcgacatcagcaattcctattggtgcgtatattgtcagcaaggtacaaacgctgttggcaagccagagtaaccccggacgcacgctgcgagcggcacgtagtgtggatgccttacacgccgcatttaatcaataaaagtcgactgaggaggatcatcatgacattacaagaggcagttgcaaagtttgttgaagatggcgacgctatctccttcggcggctttacaacaaacaagaaacctatggctgctgttcgcgagattctgcgccagggcaagaaagacttcatcgcatatgcaggtcctgccggatctgactgggatatgctgattggagaggatcgcgtaaaagcgtacatcaactgctatacagctgactccggtgttaccaacgtttcccgtcgtttccgcaaaaaaatcgaggccggcgagctgatctatgaggactactcccaggatgccatcatgtacatgcttcacgctgcttccttaggtcttccattcttaccggtacgttttatgatcggttccggactggttgatgagtggggaatcacaaaggaagtgcgccagactatcgacaagctgccgaacgacaaatttgtgtacatggacaacccatttaacccaggtgagaagaccgtatgccttccagttccgcagctggatacagcaatcatccacgtacagaaggcttcacctgacggaacctgcattctgctcggcgacgagttccacgatgtagatattgctgttgcagctaagaaggttatcgttacatgtgaggagctggtaagcaacgaagtgatccgcagagatccaacccttacaaagattccgtgcttcgcagttgacgctgtctgcgttgctccttacggcgcatacccgacacagtgctacggctactatgattatgacaacagcttcctgaaggcttatggcgcagccagcaagacagaggaggatttcaaggcattcttaaaagagtacgtttacgacgtgaaagacaatgaagagttccttgagaagatcggtgtaaatcgtctccttaagttaaaagtatctgatggctttggatatgcaacagatgtaagcaaggaggattaagtagctgaggaggatctagaatgggtcaaaaatcaaaggcaatgacacttgtaaagaatttattagataatcattataaagaagtaaatatggcaaaagaaagaggggaactagttggttggtcaacatcaatatttcctcaagagattgcagaaacatttggattacatgtattatatcctgaaaatcatgcggcagcagtagcagccaagcacgaatctttgaaagtatgcgaagttgctgaaagtaaaggatattcaatagatatatgttcttatgctagagtaaatttaggatatgtagacttaaagaaaatagaaagtataaacatgcctcaaccagacttcatactttgctgtaataacatatgtaataccgttataaaatggtatgaaaacatagcaaaggaattaaatattcctatgattttaatggataccccttttaacagtgaatacgaaattactcaagaaagaattgattatttcaaaggacagcttcaagaggctataagaaaattagaagaaattacaggtaaaaaatttgaccaaaagcgttttgaagaagttatgaaaatatccacagaagcgggaaatttgtggaaagaatctatgagtctaacaaaggctattccagcaccaatgaatggatttgaaatgtttaattatatggctgttatagtttgtgctcgtgggaaaaaggaaactgtagaaatttttaagactcttatagatgaattgcaagaaagaatagataagggagaaacaagttatagaggagaacaaaaacacagaatcatgtttgaaggtataccatgttggccatatctaagttataaattaagatcattaaatgataaaggaattaatatggtaggtagtgtttatacggatgcgtgggcacttcaatatgaatcaaatgatcttgatggaatggcaaaagcatattgtagcataatgaataatgttaatttagatagacaagtagacatgagagctaaagttattagagattttaagtgtgatggagcaatatatcatatgaatcgaagctgtaagctaatggattttatgcaatatgagttagaaagaagagtagaagcaaaaactaatgtgccatatattggatttgatggggaccaagcagatccaaggaacttcacaaaagctcagtttgaaacaagagtacaaggacttgcagaagttatggaagaaagaaaaaatgtaggaggtgtaaagcatgaatagagatgactgcaggaggatctacaatggctgataagaaagaggtcaaaaagaatgcagcaaaagtgattaatggtatattagctaaatcttatgcagatgcttggaaggcaaaagaagaaggaagaccggttggttggtcaacttccgtatttccacaggaattagtagaagtttttggtttagacgtattatatccagaaaaccaagctgcaggggttgcagctaagaaagaatctttatctctttgtgaagctgcagaaagtgctggatattcaattgatttatgtgcatatgcaagaacaaattttggacttttagaaaagggtggttcagaaaacttaaatatgccaaagcctgactttatatgctgctgtaataatatttgtaatcaagttattaaatggtatgaaaacattgcaaaggaattagatataccattaataatgattgatactacatttaataatgaaaatgaggtaacagaaaatagaattaaataccttagagctcaatttgaagaggctataaaacaacttgagaaaatttctggaaagaaatttgatcccaagaagtttgaagaagttatgaaaatctccgctgaaaacggtaagctttggaaatattctatgagtttaccatcaggatctttcccatcaccaatgaatggatttgacttatttacttatatggctgttatcgtatgctatagaggtaaaatagaaactacagaagcttttaaattattgatttctgaattagaagataatattagaaataaagcaacttcctttagaggagaagagaaatatagaattatgatggaaggaattccatgctggccatatataggctataagatgagaactttagcaggctatggtgttaatatgactggaagcgtttaccctcatgcttgggcattacagtatgaagtaaacgatttagatggaatggctaaagcttacagtactatgtttaataatgttaacttagaaagaatgtgtaaatacagagtagattctttaatagatggaaattgtgatggagcattctatcatatgaatagaagctgtaaattgatgagttttatacaatatgaaatggaaagacaagtttttcaaaaaacaggcataccatatgcgggcttcgatggagaccaagcagatccaagaaactttagtaaggctcagtttgaaacaagactgcaagggctagtagaagttatggaagaaagaaagaaaggaggaaacaaataaagctgagcaggaggatctacatgaaagcattatctattaaaccagaaatctatacctttgatacatgtaaagaatttataaacaaatttaaaataggaaaagaagatttaattattacaagtgagcatacttatgtttcatatttttctaaatataaccttgataccaatgtaatctttattagaaaatacggcactggagagccaagtgatacaatggtagaagcaatttgtaaggatataaaagatattacttataaaagagtaattgctattggcggcggaagtgtccttgacgtttcaaaattgtttgcattaaagaaagtctcgccagtacttgatttatttgatcacaaattagaatttgtaaaagataaggaattgatcctaattccaacaacttgcggaacaggcagtgaagtaactaatatttctattcttgaattgaagtcaagacatacaaaattaggtcttgctatagatgaactatatgcagattttgctgttatgattccagaacttctagagaatttaccctttaaattttttgcaactagttccattgatgccttgattcattccattgaatccagtgtttcaccaaaagctacaagctatacagaaatgttttcctataaagcaatggaaatgatcttaaaaggatatcaggagatttcaaaaaatggcccagacgccaggttttccttgttagataaatttttacttgcaagcaattatgctggaattgcatttggcaatgcagggtgtggtgcagtacatgctatgagttatcctttaggtgctaattaccatgttcctcatggagaagcaaattatcaaatgttcattggagtatttaaaacctattatcgtttaaaaccacaaggtaaaattacaaaactaaataaattcttagcatccattttaaactgcaaagaaaatgaagtttacattaaaatagaagagttattaaatgtattgattcctaaaaaacaattacgtgagtatggggtaaaagaaaaagaattaaaggaatttacacaaagtgttatgactaaacaaggtcgtttaatggcaaataactatacagaattaaatgaacaaactgtatatgaaatatataaatcattatattaagctcagctagcacccggaattgtgagcggataacaattccttggaattgtgagcggataacaattataattaagttgttaggaggttagaatgttgaaggaacaattacctaaaataataactgataaagtccctggaccgaaagcagaagaagtaatacgaagaagagaagatgcagtaccctctgcaattaaatgtgtatatcctgttgtaataaaaagggcagaaggtgcggtgattgaggatgttgatgaaaattattttcttgactggactggtggtgtaggcgtactaaacgttggattttcccatccagaagtggttgaagctgtgaaagaacagtcagagaagtatttccatggtatgtttaatattgttacacacgaaggatatgttaagctggcagagaaaatgaactccattgttcctgtaaagggaaataagaaaaaaacgtttttcgcaaatagtggagcagaggctgatgaaaatgcagtaaaaatagcaaaagcttttacaaatagacccaatatagttgtattttcaggggcatttcatggacgtacagttatgaccatggcaatgacatcgaaaaaatcttatgcctatggaatgggaccttttccagatggtgtataccgtgcagaatttccgtatttatatagaagtcctgaaggaatgccagagagtgaaaccattaattattatatagaaagtattaaaaaagtatttgatcaagcttcaccaccggagtacgtagcagctatagtagtagaaccacttcagggtgaaggcggatttattccagctcccattgaatgggttaaagcagtaagaactatttgtgataaatatggtatattgcttgttgcagatgaggtacaatgtgggttctgccgtacaggtaaaatgtttgcttctgaatattggaaggaagcaggagcagctccagatataatagcaactgcaaaatctattgcagctggtatgccattaagcgcaataacagcaagggaagagattatggaggcagtaagacccggaacaattggaggaaccttctgtggaaatgcagtagcatgtgcagcagcattaaaagtgatagaaattatggaaagagatcatttggctgaccgttctatggaaataggtaagaaagtaatgaaacgctatatggaatggaaagaaaaatatgagattgttggagatgtaagaggactcggcggaatggttggaatagaatttgtaaaaaacaaagaaaagaaagatccaaatcctgaaattgtatcagcagttattcaagaagcagcccaaaatggacttatgattgagaactcgggtgtttatggaaatgttatccgctttttagcaccacttgtaattacagataagcagcttgaagcaggattagatatttttgaaaaagcaatttctaagtgtatgcaaaagtaagttgaggaggtagataatgtctacaacacataacgtccctcagggcgatcttgttttacgtactttagccatgcccgccgataccaatgccaatggtgacatctttggtggttggttaatgtcacaaatggatattggcggcgctattctggcaaaagaaattgcccacggtcgcgtagtgactgtgcgggttgaaggaatgactttcttacggccggttgcggtcggcgatgtggtgtgctgctatgcacgctgtgtccagaaagggacgacatcggtcagcattaatattgaagtgtgggtgaaaaaagtagcgtctgaaccaatcgggcaacggtataaagcgacagaagcattatttaagtatgtcgcggttgatcctgaaggaaaacctcgcgccttacctgttgagtaaaaaggagtgtatataaatggatggcaaagagtatgttcaaaaagttttaagtactgtacaaaaaagaaatttaggtgaagaagaatttcttgatgcggtaaaagaagttttaacttctttagtacctgtatttgatagaagacctgattttattaaagcaggattacttgaaagattaactgaaccagaaagagctataagttttagagtcccatgggttgatgataatggagaggttcaagtaaacagaggttttagaattcaatttaattcggctataggaccgtataagggtgggttaagatttcatccatctgtaaatcaaagtatcgtaaaatttttaggatttgagcaaatatttaagaactccttaacagggttacctatcggaggagcaaaaggcggttcagattttgatccaaaaggcaaatctgataacgaagttatgagattttgtcaagcttttatgtctgagctgtacaagtacataggttctaatagagatgtacctgcaggagatataggtgtcggtggaagagaaattggatatctatatggctattataataaacttaaaggtgtaagtgaacagggtactttgacaggcaagggactgacttatggaggaagtcttgccagaacagaagcaacaggatatggattagtttattttactgaagaaatgctaaaggatcataatttgagtttcaaagataaaaaagtagtagtttcaggttcgggaaatgtggctatttatgctattgaaaaagcaactgaacttggagctaaagttattacttgttctgattctaatggatatattttagatgaaaatggaattaatctagatgtagtaaaagaaattaaagaagttagaaggggaagaataaaagaatatctaaaaagtgtgcctactgctaagtatgtaccagattttagagaaatttggaatgttaagtgtgacatagctcttccttgtgcaactcaaggtgaaataaatgagaaatctgctaaggctcttgtagaaaatggtgttatagctgtatcagaaggagcaaatatgccgtcaactttagatgcaataaatgtatttttaagtaataagattctttttggaccttctaaggcagctaatgcaggaggagttgcatgttctgctattgaaatgtctcagaatagtataaggtattcatggacatttgaagaggtaaataataagatcaaaaatataatgattaatatttataataattctaaaaacgcggcaaaagaatatggaaatgaaggaaatatagttgtaggagccaatattgctggatttttaaaagttgctgaggctatgatggcccaaggcataatttaaaagacattcgggaggaagaatttaaatgggtttctactctatgcctagatatttccaaaatatgcctcaggtgggcaaacccctgaaaaaggcggatgccgccaatgaagaacagctgaaaaagatcgaagaagagatccatcagctgatcaaagaggctcaggaagccggcaaggcagatgctgatgtaaacaagagaggggaactgaccgctctccagagaattgaaaaactggtggaaccgggctcctggagacccctgaacaccctgttcaaccctcagggcaacaagaacggctccgtggccatcgtcaagggcctgggccgtgtaaacggcaaatggtgcgtggtcgtggcttccgacaacaagaagctggccggtgcctgggtgccaggccaggctgaatgcctgctgcgggcttccgataccgccaagaccctgcacgtgcctctggtgtatgtgctgaactgctccggcgttaagttcgacgaacaggaaaaggtataccccaaccgtcgtggcggcggtacgcctttcttccggaacgctgaactgaaccagctgggcattcccgtcatcgttggcatctacggcaccaaccctgccggcggcggctatcattccatcagccccacggtgatcattgcccatgaaaaagccaacatggctgtgggcggcgccggcattatgggcggcatgaaccccaaaggtcatgtggacctggaatatgccaacgaaatcgccgacatggtggaccgtaccggcaagaccgaacctccgggagctgtcgacatccactacaccgaaaccggtttcatgcgtgaagtctatgcttccgaagaaggcgttctggaagggatcaagaagtatgtaggcatgctgccgaaatacgatcctgaattcttccgggtggacgatccgaaagcaccggcattcccggctgacgacctgtacagcatggttcctctgaacgacaaacgggcttatgacatctacaatgtaattgcccgcctgttcgacaacagcgaactccatgaatacaaaaaaggctacggccctgaaatggtcaccggtctggccaaagtcaacggcctgctggtgggcgttgtggccaacgtccagggtctcctgatgaactaccctgaatacaaggctgcaggctccgtagggatcggcggcaaactgtaccgccagggtctggtgaaaatgaatgaattcgtcaccctgtgcgccagagaccgtctgcccatcgtctggatccaggataccaccgggatcgatgtgggcaacgatgcggaaaaggctgaactgctgggtctgggccagtccctgatctactccatccagacttcccacatccctcaattcgaaattaccctgagaaaaggcacggctgctgcccactacgtactgggcgggcctcagggcaatgacaccaacgccttctccatcggtaccgctgctacggaaatcgccgttatgaacggtgaaaccgctgccaccgccatgtactcccggagactggccaaagaccggaaagccggcaaggatctgcagccgaccatcgacaagatgaacaacctgatccaggctttctacaccaaatctcgtccgaaagtctgtgctgaactgggtctggtggatgaaatcgtggacatgaacaagatccgcgggtatgtggaagccttcacggaagctgcttatcagaatccggaaagcatctgcccgttccatcagatgattctgcctcgtgccatcagagagtttgagactttcgtaaagaaataatccttacaaggaggatctacaatgaccgacaatccttggctgattatgatgatcaacatgaccatcgtattcggtgtgctgattgtgctgggaatcctgatggtgctgatccatgctgtcgatcccaccaagaaagttcagggaaaaaaaaagcctgtagttgctaagccggcgccttccgctgctgccagcaaacggcaggaagaggaaaaagtggctgccatggcagctgtcctggccctggtccaggatgaagacgatatgattgcagctgccctgagtgctgccatcgccgaacacaaaagaaaaatggagccgatgaatctgccccatcattctttctgatgaactgttgagggacggttcattatccacaaaatcaaacaacttgaaaactgtttaggagggattctcatgagaaaattcaatgttaacgttaacggtactgtttacactgtagaagttgaagaagtcggcggcgctgtaactgcagctcctgctgctcctgccgctcctgccgctgctcctgctgccgctcctgtagctgctgctcctgctgctgctcccgctccggctcctgccgctgctcctgctgctgctcccgctccggctgccaaaccggccgctgctgctcctgccggctccgtaaccgtatccgctcccatgcccggcaagatcctgtccgttaacgtaaaacccggcgacaaagtggaagccggcgatgttctgctgatcctggaagctatgaagatgcagaacgaaatcatggctcctgaagacggcacggtttccgaagtccgcgtaaacgctggcgataccgtagccaccggcgacgtaatggttattctctaatcaacgtctccgaacataaaggaggattttagaacatggatgcttttgtggtagccctgacctctgtcatccaggacagtgggtttgtggcttttacctggggcaatgccgtaatgatgctggtcgggtgcatcctgctgtacctggccatcgtcaaaggctttgaacccctgctgctgagcccgatcgccttcgggtgcattctggccaacgtaccccggaccgggttcgaaaccgaccccggcgtcatgcagctgatcctgggcgggatcaaatacgaaatcttccctccgctgattttcatgggcgtaggggccatgaccgactttggtccgctgattgccaaccccaagaccctgctgctgggcgctgctgcccagatcggcgtgttcgtggctctgctgggggccatgctcctgggcttcaatgtgaaggaagcttccgccatcgggatcatcggtggtgctgacggcccgacttccatttacctggcttccaagatggctccccatctgctgggcgccatcgccgtggccgcttattcctacatgtccctggtgcccctgatccagccgcctgtgatgaaactgttcacctccaaggaagaacggaagatcaaaatggcccagctgcgtacggtgacccactttgaaaaagtggtgttccccattgtcaccaccattttcatttccctgctgctgccttccgtatgctctttgatcgggatgctgatgctggggaacctgttcaccgaatccggctgtatggaccgtctgtctgacacggcacagaatgccctgatgaacagcgtgaccatcatgctggccaccggtaccggcctgaccatgaaggccgaaagcttcctgaccttgcagaccatcgaaatcatctgcctgggtctggttgcctttatcggcggcaccgccggcggtgtgctgttcggcaagctgatgagcaagctggacggcggcaagaccaacccgctgattggttctgccggtgtatccgcagtgcctatggctgcccgtgtgtcccaggttgtgggacagcaggctgaccctggcaacttcctgctgatgcacgccatgggccccaatgtggccggggttatcggtacggctgttgcagctggtaccatgctggccatggtgggcggcaaataaagtcaaggaggagcataatggagtgggaagagatatataaagagaaactggtaactgcagaaaaagctgtttcaaaaatagaaaaccatagcagggtagtttttgcacatgcagtaggagaacccgtagatttagtaaatgcactagttaaaaataaggataattatataggactagaaatagttcacatggtagctatgggcaaaggtgaatatacaaaagagggtatgcaaagacattttagacataatgctttatttgtaggcggatgtactagagatgcagtaaattcaggaagagcagattatacaccttgttttttctatgaagtgccaagtttgtttaaagaaaaacgtttgcctgtagatgtagcacttattcaggtaagtgagccagataaatatggctactgcagttttggagtttccaatgactataccaagccagcagcagaaagtgctaagcttgtaattgcagaagtgaataaaaacatgccaagaactcttggagattcttttatacatgtatcagatattgattatatagtggaagcttcacacccattgttagaattgcagcctcctaaattgggagatgtagaaaaagccataggagaaaactgtgcatctttaattgaagatggagctactcttcagcttggaataggtgctataccagatgcggtacttttattcttaaagaacaaaaagaatttaggaatacattctgagatgatatcagatggtgtgatggaactggtgaaggcaggggttatcaataacaagaaaaagaccctccatccaggcaaaatagttgtaacatttttaatgggaacaaaaaaattatatgattttgtaaacaataatccaatggtagaaacttattctgtagattatgtaaataatccactggtaattatgaaaaatgacaatatggtttcaataaattcttgtgttcaagtagacttaatgggacaagtatgttctgaaagtataggattgaaacagataagtggagtgggaggccaggtagattttattagaggagctaatctatcaaagggtggaaaggctattatagctataccttccacagctggaaaaggaaaagtttcaagaataactccacttctagatactggtgctgcagttacaacttctagaaatgaagtagattatgtagttactgaatatggtgttgctcatcttaagggcaaaactttaagaaatagggcaagagctctaataaatatcgctcatccaaaattcagagaatcattaatgaatgaatttaaaaagagattttagagattaaggaggactacgaatgtctttaatgactggggaagaatatgtagaaagtttacgtaaattaaaattaaacgtttattatctgggagagaaaatagataatccagtggataaccctgtacttcgtccatctttaaattctgttaagatgacttatgacttggcccaagaagcagaatatgaggatttaatgacaacaacatcaaatataacaggtgaaaaaataaatagatttacaaatttacatcaaagcagtgaagatttggtaaaaaaagttaaaatgcagagattgtgcggacaaaaaactgcagcctgtttccaaagatgcgttggtatggactcatttaatgcagtgtacagtactacttttgaaatagataaggaatataatacaaattattttgaaaatttcaagaaatttttaacttatgttcaaaagaacgatttaacagtagatggagctatgacagatccaaaaggagacagaggattgtcaccaagcaaacaggctgatccagatttatatttaagagttgtagaaagaagagaagacggtgtagttgtaagaggagcaaaggctcaccagacaggtatatgtaattctcatgaagtattggttatgccaactattgctatgagaccggatgataaagattatgcaatagctttttctgttcctacagatgcagaaggaataactatgataattggaagacagtcctgtgatactagaaaaatggaaaaagatgcggacatagatgttggtaataaagaatttggcggagtagaagcattagtagtatttgacgatgtatttgttccaaatgacaggatattcttaaatggtgaaactgaatatgcaggaatgttagtagagagatttgcaggatatcatagacaaagttatggtggatgcaaagtaggagtgggagatgtattgataggcgctgctgcagtggctgcagactataatggagctgcaaaggcatctcacataaaggataaattaatagaaatgatgcatttaaatgaaactctttacgcttgcggaattgcgtgctcagcagaaggacatgcaacaaaagctggaaattaccaaatagacttgcttcttgcaaatgtatgtaagcaaaatataacaagattcccttatgaaattgtgagattagcagaagatatagcaggaggattaatggttactatgccttctgaaaaggattataagagtccagaggttggaaaatatgtagagaagtacttggtgggagttgcatccgtacctgttgaagacagaatgaagatattaagattattagaaaatatatgtcttggaacggctgcagtaggatatagaactgaatccatgcatggagcaggttcacctcaagcacagagaataatgatatcaagacagggaaacctagcacataagaagaaacttgcaaagaagatagctagaatagaagattaagctatcataaaaataagaagcctgcatttgcaggcttcttatttttat

SEQ ID NO: 44 - DNA, 31258 bp, artificial sequence
  plasmid SG726
aaggccagcaaaaggccaggaaccgtaaaaaggccgcgttgctggcgtttttccataggctccgcccccctgacgagcatcacaaaaatcgacgctcaagtcagaggtggcgaaacccgacaggactataaagataccaggcgtttccccctggaagctccctcgtgcgctctcctgttccgaccctgccgcttaccggatacctgtccgcctttctcccttcgggaagcgtggcgctttctcatagctcacgctgtaggtatctcagttcggtgtaggtcgttcgctccaagctgggctgtgtgcacgaaccccccgttcagcccgaccgctgcgccttatccggtaactatcgtcttgagtccaacccggtaagacacgacttatcgccactggcagcagccactggtaacaggattagcagagcgaggtatgtaggcggtgctacagagttcttgaagtggtggcctaactacggctacactagaagaacagtatttggtatctgcgctctgctgaagccagttaccttcggaaaaagagttggtagctcttgatccggcaaacaaaccaccgctggtagcggtggtttttttgtttgcaagcagcagattacgcgcagaaaaaaaggatctcaagaagatcctttgatcttttctacggggtctgacgctcagtggaacgaaaactcacgttaagggattttggtcatgagattatcaaaaaggatcttcacctagatccttttaaattaaaaatgaagttttaaatcaatctaaagtatatatgagtaaacttggtctgacagctcttcctttttcaatattattgaagcatttatcagggttattgtctcatgagcggatacatatttgaatgtatttagaaaaataaacaaataggggttccgcgcacatttccccgaaaagtgccacctgacggtcctaaatttatattttttactttataatatataattgattatagaatccaaattagataggaggaccaggtaaatggagaataattttattgtcaacgaaaacgagaaaagggttttaaagcagatatttaacaactccaatatcagtagaactcaaatttccaagaatttagaactgaataaagcaacaatttcgaacattcttaacaatctaaagcataaaagtttggtaaatgaagttggtgaaggaaattctactaaaagtggtggaagaaaacctatacttctcgaaattaatcaaaagtatgggtattatataagcatggatttgacatatgattctgttgagttaatgtataactattttgatgctacaattctcaaacaagatagttatgaactgaatgataagaatgtaagtagcatattacagatactcaaatctaacataaatgttagcgaaaaatacgacacattatacggtttattagggataagtatatccatacatgggattgtagatgatgaacaaaacatcattaatctaccatttcacaagaatgaaaaaagaacgtttactgatgaacttaagtctttcactaatgtaccagtggttattgaaaatgaggcaaatttaagtgcattatacgagaaaagtttatacatcaattcgaatattaacaacttgatcacattgtctatacataaaggtataggagctggcatcataatcaataagaaactctatagaggtagtaatggagaagctggagaaataggaaagactcttgttttagagtctatcaataacaatgataacaagtactataaaatagaggatatttgtagtcaagacgctttgatacaaaagattaataacagattaggagttacacttacatttaccgaactaatacagtattataacgaaggaaatagtattgtagctcatgaaatcaaacagtttatcaacaaaatgactgtcttaatacacaatcttaatactcagtttaatccagatgcaatatacatcaattgtcccttgattaatgaacttcctaatattctaaacgaaatcaaagaacaattctcttgtttttcacaaggaagtcctatacaattgcatttaaccactaatgttaaacaagctacattattaggtggaacattagcaattatgcagaaaacccttaacataaacaatatccaaatgaatattaaatagttacagcagtctgagttataaaatagatatctcggaccgtctattcttccttatttgagtgggtaccaatgaaatctttcgagctaaatcgatttctggcccactcttttttattttttagtaagcgtttacaaaaaatgaacaatgtgctatattacctctaaagttagtttgtttattaaattaaccaactaaaatgtcgggatccttactgcaataggttgctactgttttatcatgaatcatcaacgaatgtattttgcatatttcagtatctttaataaactctttgcaatttttacaagttttcatatacgcccttcttttcataaattaatttatgaattctatgtattccaaggagcttttggatccaattaggaggaatctgcgatggaaaagaaggaatttagagttttaataaagtattgttttcttaaaggaaagaatacagtagaagctaagacttggttagataatgaatttccagattctgctcctggtaaaagtacaattatagattggtatgcaaaatttaaaagaggagaaatgtcaacagaagatggagaaagatctggtagaccaaaagaagttgtaactgatgaaaatataaagaagatacataaaatgatattaaatgatagaaagatgaagttaatagaaatagcagaagctttaaaaatatctaaagaaagagttggacatataatacatcaatatttagatatgagaaaattatgtgcaaaatgggttccaagagaattaacttttgatcaaaagcaaagaagagtagatgatagtaagagatgtttacaattattaacaagaaatactccagaatttttcagaagatatgtaacaatggatgaaacttggttacatcattatacacctgaaagtaatagacaatcagcagaatggacagctactggagaaccatcacctaaaagaggaaagactcaaaagagtgctggaaaggttatggcatcagtattttgggatgctcatggtataatatttatagattatttagaaaaaggaaaaacaataaattctgattattatatggcattattagaaagattaaaagttgaaatagcagctaaaagaccacatatgaagaagaaaaaagtattatttcatcaagataatgctccttgtcataagtcattaagaactatggcaaagatacatgaattaggttttgaattattaccacatccaccttattcaccagatttagctccttctgatttctttttatttagtgatttaaagagaatgttagcaggaaagaagtttggttgtaatgaagaagttatagcagaaacagaagcttattttgaagcaaaacctaaggaatattatcaaaatggaataaagaagttagaaggtagatataatagatgtatagcattagaaggaaattatgtagaataagaattccttaattaaggagctcgataaaaataagaagcctgcatttgcaggcttcttatttttatggtgcatcagctcttatatattaagctaccaacttagtatataagccaaaacttaaatgtgctaccaacacatcaagccgttagagaactctatctatagcaatatttcaaatgtaccgacatacaagagaaacattaactatatatattcaatttatgagattatcttaacagatataaatgtaaattgcaataagtaagatttagaagtttatagcctttgtgtattggaagcagtacgcaaaggcttttttatttgataaaaattagaagtatatttattttttcataattaatttatgaaaatgaaagggggtgagcaaagtgacagaggaaagcagtatcttatcaaataacaaggtattagcaatatcattattgactttagcagtaaacattatgacttttatagtgcttgtagctaagtagtacgaaagggggagctttaaaaagctccttggaatacatagaattcataaattaatttatgaaaagaagggcgtatatgaaaacttgtaaaaattgcaaagagtttattaaagatactgaaatatgcaaaatacattcgttgatgattcatgataaaacagtagcaacctattgcagtaaatacaatgagtcaagatgtttacataaagggaaagtccaatgtattaattgttcaaagatgaaccgatatggatggtgtgccataaaaatgagatgttttacagaggaagaacagaaaaaagaacgtacatgcattaaatattatgcaaggagctttaaaaaagctcatgtaaagaagagtaaaaagaaaaaataatttatttattaatttaatattgagagtgccgacacagtatgcactaaaaaatatatctgtggtgtagtgagccgatacaaaaggatagtcactcgcattttcataatacatcttatgttatgattatgtgtcggtgggacttcacgacgaaaacccacaataaaaaaagagttcggggtagggttaagcatagttgaggcaactaaacaatcaagctaggatatgcagtagcagaccgtaaggtcgttgtttaggtgtgttgtaatacatacgctattaagatgtaaaaatacggataccaatgaagggaaaagtataatttttggatgtagtttgtttgttcatctatgggcaaactacgtccaaagccgtttccaaatctgctaaaaagtatatcctttctaaaatcaaagtcaagtatgaaatcataaataaagtttaattttgaagttattatgatattatgtttttctattaaaataaattaagtatatagaatagtttaataatagtatatacttaatgtgataagtgtctgacagtgtcacagaaaggatgattgttatggattataagcggccggccagtgggcaagttgaaaaattcacaaaaatgtggtataatatctttgttcattagagcgataaacttgaatttgagagggaacttagatggtatttgaaaaaattgataaaaatagttggaacagaaaagagtattttgaccactactttgcaagtgtaccttgtacctacagcatgaccgttaaagtggatatcacacaaataaaggaaaagggaatgaaactatatcctgcaatgctttattatattgcaatgattgtaaaccgccattcagagtttaggacggcaatcaatcaagatggtgaattggggatatatgatgagatgataccaagctatacaatatttcacaatgatactgaaacattttccagcctttggactgagtgtaagtctgactttaaatcatttttagcagattatgaaagtgatacgcaacggtatggaaacaatcatagaatggaaggaaagccaaatgctccggaaaacatttttaatgtatctatgataccgtggtcaaccttcgatggctttaatctgaatttgcagaaaggatatgattatttgattcctatttttactatggggaaatattataaagaagataacaaaattatacttcctttggcaattcaagttcatcacgcagtatgtgacggatttcacatttgccgttttgtaaacgaattgcaggaattgataaatagttaacttcaggtttgtctgtaactaaaaacaagtatttaagcaaaaacatcgtagaaatacggtgttttttgttaccctaagtttactctatcattgatagagtgcgactctatcattgatagagtccacaggttggctgataagtccccggtctgtaccgttcgtataatgtatgctatacgaagttataggaggttataatgaacgagaaaaatataaaacacagtcaaaactttattacttcaaaacataatatagataaaataatgacaaatataagattaaatgaacatgataatatctttgaaatcggctcaggaaaagggcattttacccttgaattagtacagaggtgtaatttcgtaactgccattgaaatagaccataaattatgcaaaactacagaaaataaacttgttgatcacgataatttccaagttttaaacaaggatatattgcagtttaaatttcctaaaaaccaatcctataaaatatttggtaatataccttataacataagtacggatataatacgcaaaattgtttttgatagtatagctgatgagatttatttaatcgtggaatacgggtttgctaaaagattattaaatacaaaacgctcattggcattatttttaatggcagaagttgatatttctatattaagtatggttccaagagaatattttcatcctaaacctaaagtgaatagctcacttatcagattaaatagaaaaaaatcaagaatatcacacaaagataaacagaagtataattatttcgttatgaaatgggttaacaaagaatacaagaaaatatttacaaaaaatcaatttaacaattccttaaaacatgcaggaattgacgatttaaacaatattagctttgaacaattcttatctcttttcaatagctataaattatttaataagtaagttaagggatgcataaactgcatcccttaacttgtttttcgtgtacctattttttgtgaatcgattatgtcttttgcgcattcgtcgacaattgcatatattgataaaaataataatagtgggtataattaagttgttaggaggttagttagaatgagtagactcgataagtctaaagtgataaattccgcattagaactccttaatgaagttggaattgaaggtctaactaccaggaaattagctcagaaacttggagttgaacaaccaacattgtactggcatgtcaaaaacaaaagagcactcttagatgcattagcaatcgaaatgttagacagacatcatacacacttttgtccattagaaggtgaaagttggcaagactttttgaggaataacgcgaaaagtttcagatgtgctttactatcccatagagatggggctaaagttcacttaggaactagacctacagaaaagcagtatgagacacttgaaaatcagttggcatttctatgtcaacaaggattctcattagagaacgcattatatgctctttcagctgtaggtcatttcacgttaggttgtgttttggaagatcaagaacatcaagttgcaaaagaagagagagaaactcctactacagatagtatgccacctttattacgacaagctatagaactgtttgatcatcaaggagctgaacctgcgtttctctttggattggagttaataatttgcggactagagaaacagcttaagtgtgaaagtggatcttagttagcaccggtcagggtggtgaatgtgaaaccagtaacgttatacgatgtcgcagagtatgccggtgtctcttatcagaccgtttcccgcgtggtgaaccaggccagccacgtttctgcgaaaacgcgggaaaaagtggaagcggcgatggcggagctgaattacattcccaaccgcgtggcacaacaactggcgggcaaacagtcgttgctgattggcgttgccacctccagtctggccctgcacgcgccgtcgcaaattgtcgcggcgattaaatctcgcgccgatcaactgggtgccagcgtggtggtgtcgatggtagaacgaagcggcgtcgaagcctgtaaagcggcggtgcacaatcttctcgcgcaacgcgtcagtgggctgatcattaactatccgctggatgaccaggatgccattgctgtggaagctgcctgcactaatgttccggcgttatttcttgatgtctctgaccagacacccatcaacagtattattttctcccatgaagacggtacgcgactgggcgtggagcatctggtcgcattgggtcaccagcaaatcgcgctgttagcgggcccattaagttctgtctcggcgcgtctgcgtctggctggctggcataaatatctcactcgcaatcaaattcagccgatagcggaacgggaaggcgactggagtgccatgtccggttttcaacaaaccatgcaaatgctgaatgagggcatcgttcccactgcgatgctggttgccaacgatcagatggcgctgggcgcaatgcgcgccattaccgagtccgggctgcgcgttggtgcggacatctcggtagtgggatacgacgataccgaagacagctcatgttatatcccgccgttaaccaccatcaaacaggattttcgcctgctggggcaaaccagcgtggaccgcttgctgcaactctctcagggccaggcggtgaagggcaatcagctgttgcccgtctcactggtgaaaagaaaaaccaccctggcgcccaatacgcaaaccgcctctccccgcgcgttggccgattcattaatgcagctggcacgacaggtttcccgactggaaagcgggcagtgagcgcaacgcaattaatgtaagttagctcactcattaggcaccgggatctcgaccgatgcccttgagagccttcaacccagtcagctccttccggtgggcgcggggcatgactagcatgatcgtgctcctgtcgttgaggacccggctaggctggcggggttgccttactggttagcagaatgaatcaccgatacgcgataacttcgtataatgtatgctatacgaacggtagctcagctagcacccggaattgtgagcggataacaattccttggaattgtgagcggataacaattataattaagttgttaggagggaacttagatgagcgatttcagcaccctcgaagtgatccgcgacccgcgcggcttcgccaccctgtggttaagccgtgaggacaagaacaacgccttcaatgcgcagatgatccgcgagctgatcgtggccatcgaccagttggccgaagacgccagcctgcgctttgtgctgctgcgcggccgtggccggcacttcagcgccggtgccgacctggcctggatgcagcagtcggcgcaactggacttcaacaccaacctggatgatgcccacgaactgggcgagctgatgtacgccctgcatcgcctcaaggccccgaccctggccgtggtgcaaggtgcagcctttggcggcgcgctgggcctgatcagctgctgcgacatggccatcggcgccgaagacgcccaactgtgcctgtcggaagtacgcatcggcctggccccggcggtcatcagcccgttcgtggtcaaggccattggcgaacgcgccgcgcgccgctacgccctcaccgccgagcgtttcactggcgtgcgcgcacgcgagctgggcctgctggccgaggtgtacccggccagcgaactggacgaccacgtcgaagcctgggtaagcaacctgctgcagaacagcccgcaagcattgcgcgccaccaaggacttgctgcgcgaagtggacgacggcgaactcagcccggccctgcgccgttactgcgaaaacaccatcgcccgtatccgcgtcagcgccgaaggccaggagggcctgcgcgctttcctggaaaaacgccgccctgcctggcaaaccgttgacaagaaggagccgcgcccatgaacgatagggaggactgcaatgaagacggcgcgctggtgctcgctggaggaggcggtggcttccattccggatggcgcgtcgctggccaccggcggtttcatgctgggtcgcgcccccatggcgctggtgatggagctcatcgcgcagggcaagcgcgacctgggcctcatctccctccccaacccgctgcccgcggagttcctcgtggcgggcggctgtctggccaggctggagattgccttcggcgcgctgagcctccagggccgcgtgcgtcccatgccctgcctcaagcgggccatggagcaaggcaccctcgcctggcgcgaacatgatggctaccgcgtcgtccagcggctgcgcgccgcgtccatggggctgcccttcatccccgcgccggacgcggacgtgtccgggctggcacggacggagccgcctcccacggtggaggaccccttcaccggcctgcgcgtggcggtggagcctgccttctatccggacgtggcgttgctccacgcgcgcgccgcggacgagcgcggcaacctctacatggaagacccgaccacggacctgctggtggcgggcgcggcgaagcgggtgattgccacggtggaggagcgggtggcgaagctgcctcgcgccaccctgcccggcttccaggtggaccgcatcgtcctggctcccggcggcgccctgcccaccggctgcgccggactctacccgcacgacgacgaaatgctggcccgctacctgtcgctggcggagacgggccgtgaagcggagttcctggaaacgttgctgacgcggagggcggcatgaacgtaaggaggattcaatgagcgcgacgctggacatcaccccagcggagaccgtggtctccctgctggcgcggcagattgatgacggcggcgtggtggccacgggcgtggcgtcaccgctggccatcctggccatcgccgtggcgcgcgcgacgcacgcgccggacctgacgtacctggcctgcgtgggctcgttggatccggagattcccacgctgctgccctcctccgaggacctgggctacctggatggccggtccgcggaaatcaccattccggacctgttcgaccacgcgcggcgcggccgggtggacaccgtcttcttcggcgcggccgaggtggatgccgagggccgcaccaacatgacggccagcggcagcctggacaagccgcggacgaagttccccggcgtggcgggcgcagcgacgctgcggcagtgggtgcgccggccggtgctgttggtgccgcgccagtcgcgccgcaacctggtgccggaggtgcaggtcgccaccacgagagatccgcgccggccggtgacgctcatctccgacctgggcgtgttcgaactgggcgcgtccggcgcgcggctgctcgcgcgacacccctgggcctcggaagagcacatcgcggagcgcacgggcttcgccttccaggtctccgaagcgctgtccgtcacctcgcttccggatgcccggacggtggcggccattcgcgccatcgatccgcacggctaccgcgacgcgctcgtcggcgcctgaaacgtacgaggaggactaatgaaagttacaaatcaaaaagaactaaaacaaaagctaaatgaattgagagaagcgcaaaagaagtttgcaacctatactcaagagcaagttgataaaatttttaaacaatgtgccatagccgcagctaaagaaagaataaacttagctaaattagcagtagaagaaacaggaataggtcttgtagaagataaaattataaaaaatcattttgcagcagaatatatatacaataaatataaaaatgaaaaaacttgtggcataatagaccatgacgattctttaggcataacaaaggttgctgaaccaattggaattgttgcagccatagttcctactactaatccaacttccacagcaattttcaaatcattaatttctttaaaaacaagaaacgcaatattcttttcaccacatccacgtgcaaaaaaatctacaattgctgcagcaaaattaattttagatgcagctgttaaagcaggagcacctaaaaatataataggctggatagatgagccatcaatagaactttctcaagatttgatgagtgaagctgatataatattagcaacaggaggtccttcaatggttaaagcggcctattcatctggaaaacctgcaattggtgttggagcaggaaatacaccagcaataatagatgagagtgcagatatagatatggcagtaagctccataattttatcaaagacttatgacaatggagtaatatgcgcttctgaacaatcaatattagttatgaattcaatatacgaaaaagttaaagaggaatttgtaaaacgaggatcatatatactcaatcaaaatgaaatagctaaaataaaagaaactatgtttaaaaatggagctattaatgctgacatagttggaaaatctgcttatataattgctaaaatggcaggaattgaagttcctcaaactacaaagatacttataggcgaagtacaatctgttgaaaaaagcgagctgttctcacatgaaaaactatcaccagtacttgcaatgtataaagttaaggattttgatgaagctctaaaaaaggcacaaaggctaatagaattaggtggaagtggacacacgtcatctttatatatagattcacaaaacaataaggataaagttaaagaatttggattagcaatgaaaacttcaaggacatttattaacatgccttcttcacagggagcaagcggagatttatacaattttgcgatagcaccatcatttactcttggatgcggcacttggggaggaaactctgtatcgcaaaatgtagagcctaaacatttattaaatattaaaagtgttgctgaaagaagggaaaatatgctttggtttaaagtgccacaaaaaatatattttaaatatggatgtcttagatttgcattaaaagaattaaaagatatgaataagaaaagagcctttatagtaacagataaagatctttttaaacttggatatgttaataaaataacaaaggtactagatgagatagatattaaatacagtatatttacagatattaaatctgatccaactattgattcagtaaaaaaaggtgctaaagaaatgcttaactttgaacctgatactataatctctattggtggtggatcgccaatggatgcagcaaaggttatgcacttgttatatgaatatccagaagcagaaattgaaaatctagctataaactttatggatataagaaagagaatatgcaatttccctaaattaggtacaaaggcgatttcagtagctattcctacaactgctggtaccggttcagaggcaacaccttttgcagttataactaatgatgaaacaggaatgaaataccctttaacttcttatgaattgaccccaaacatggcaataatagatactgaattaatgttaaatatgcctagaaaattaacagcagcaactggaatagatgcattagttcatgctatagaagcatatgtttcggttatggctacggattatactgatgaattagccttaagagcaataaaaatgatatttaaatatttgcctagagcctataaaaatgggactaacgacattgaagcaagagaaaaaatggcacatgcctctaatattgcggggatggcatttgcaaatgctttcttaggtgtatgccattcaatggctcataaacttggggcaatgcatcacgttccacatggaattgcttgtgctgtattaatagaagaagttattaaatataacgctacagactgtccaacaaagcaaacagcattccctcaatataaatctcctaatgctaagagaaaatatgctgaaattgcagagtatttgaatttaaagggtactagcgataccgaaaaggtaacagccttaatagaagctatttcaaagttaaagatagatttgagtattccacaaaatataagtgccgctggaataaataaaaaagatttttataatacgctagataaaatgtcagagcttgcttttgatgaccaatgtacaacagctaatcctaggtatccacttataagtgaacttaaggatatctatataaaatcattttaaatgacaggaggactatgagcgcacccaccatcgaatccgagcagtcgacagacatcggctacgtgttcgaggttccggatcggccgaacggcccggccgttcgccgactactgcggcgcagcggcgcactgctgggagccgtcgggacggtggccacgctgaccgcgtggcgcagcaaacggccacgggttcgggcgatagcgctcggactgctggccccgggcggcggtcagctctatacccgcagcccgttgcgattcgtggccacggtcgccggcttcttcgcatcgctggtcgcgtggttcggcagcggcaacatcatcgccccggtcctggtgtggctgacggcggcgaccaacgccggcagtcacgccgccggcggccggaggacctggaacggtgcacgccgggtgattccgacggcggtggcgggggccgccgccgccggaatagtggcccgacgccgggcctttcacgccgcgcaggcccgtgggagaactcgtgccgagtatctgacgacagcgcctcgtctggacccgcagccgaaagatgcggcatccgaggaactgtcgcccaccgatctcgcggtcctgcgctcgctgctggaccgggcgctgcagcccctggagaatttcgacgggttcgaccgtatcgaccagttccagacttcggcgatgcgctaccagtgcaacttcatgcagtacgcgctggccacagcacaactgcacgccacgccgtcgttccacggttatctgtcggccgcacaacgcaatctgatcgacaagctcacgctgccggcggtgtggcgctactgggccttcgaacagacctggggcaatctcagtctggactgggacccgatgaaacgcgacaacatcatgctctcgggatacctaggcatgatgctgggtgcctacgaatccaacaccggcgacgaccgttaccgccgcagtggggcgttgcccttccggttggggaaacgcgactggccctacacccacgacatggtgagtgctgccgtgcacgacaacatgcagcgctccggtatgacgctgttcccctgcgaaccgaactggatctacagcgcctgcaacatgccggcgatcagctcgctgatgatgtccgaccgcctgcacggcacccggtacatcgaatcggtcggcgaggactttcgacgccggctgcacggcgaattcattactcccgatggccgtatcaccgcaatacggtcctcgcggctgggcgtgaccatcccgatgctcacctccacaatggccgactgcggcctggcgtccatgctgcacgcattcgatccggaactggcacagcggtgctggaccatcgcccgtcgtgagttcattgacacgactgggcccgaaccggtcatcgtgctgcgggggtgggacgcgatcgataccggcaactaccgtaagacgacgttgggcgccgtcgcacccgtcatgtgggcggccgccgagatgggcgacacagatctggtcgcccagctgaccaccacgttggagcggcatgcacagcccaccgagaccggcggagcccgctggtacgccgagctgtcgaccaatatgaacgcgatggcggccctggcgcgattcaacccgcccggtggccagcgggcgctgatcagtgccggacccggcacgcagatcctgaccggaccggtgctcgacgacgtcgtgtacccagaggtcctggtggcgtcggcacgcaccgatggagccgacctgcggctggtactgcggcccggggctggtgccgcacgcgtgagcatcggagtgcgacacctgcatcccggcggccgctaccgggtgaacggcgccgtcgacagcgaggtgaccgccgacaaccagggccgcagtcacctggaggtcgacctgatcgaccgcaccgaagtctccctgacaccggcgccatgagttgaggaggtagataatgtctgccaattttactgataaaaatggtcgccaatcaaaaggagttcttttactacgaactttggcgatgccttctgacaccaatgctaacggagatatttttggtggctggattatgtctcaaatggatatgggcggcgcgattttagcgaaagaaatcgcacacggacgcgtggttactgttgccgttgaaagtatgaattttatcaaaccaatctctgtgggcgatgttgtttgttgctacggtgaatgtctcaaagttgggcgttcttccattaaaattaaagtagaagtatgggtaaaaaaagtggcgagtgagccaattggcgaacgttattgtgtcaccgatgcggtatttacttttgttgcagttgataataatggtcgctctcgcacgattccccgtgaaaataaccaagagttagaaaaagcattagccttaatttcagaacaacccttgtaaaaaggagtgtatataagtgattaagagttttaatgaaattatcatgaaggtaaagagcaaagaaatgaaaaaagttgctgttgctgtagcacaagacgagccagtacttgaagcagtaagagatgctaagaaaaatggtattgcagatgctattcttgttggagaccatgacgaaatcgtgtcaatcgcgcttaaaataggaatggatgtaaatgattttgaaatagtaaacgagcctaacgttaagaaagctgctttaaaggcagtagagcttgtatcaactggaaaagctgatatggtaatgaagggacttgtaaatacagcaactttcttaagatctgtattaaacaaagaagttggacttagaacaggaaaaactatgtctcacgttgcagtatttgaaactgagaaatttgatagactattatttttaacagatgttgctttcaatacttatcctgaattaaaggaaaaaattgatatagtaaacaattcagttaaggttgcacatgcaataggaattgaaaatccaaaggttgctccaatttgtgcagttgaggttataaaccctaaaatgccatcaacacttgatgcagcaatgctttcaaaaatgagtgacagaggacaaattaaaggttgtgtagttgacggacctttagcacttgatatagctttatcagaagaagcagcacatcataagggagtaacaggagaagttgctggaaaagctgatatcttcttaatgccaaacatagaaacaggaaatgtaatgtataagactttaacatatacaactgattcaaaaaatggaggaatcttagttggaacttctgcaccagttgttttaacttcaagagctgacagccatgaaacaaaaatgaactctatagcacttgcagctttagttgcaggcaataaataaactggactaaggaggacgtaatgtatagattactaataatcaatcctggctcgacctcaactaaaattggtatttatgacgatgaaaaagagatatttgagaagactttaagacattcagctgaagagatagaaaaatataacactatatttgatcaatttcaattcagaaagaatgtaattttagatgcgttaaaagaagcaaacatagaagtaagttctttaaatgctgtagttggaagaggcggactcttaaagccaatagtaagtggaacttatgcagtaaatcaaaaaatgcttgaagaccttaaagtaggagttcaaggtcagcatgcgtcaaatcttggtggaattattgcaaatgaaatagcaaaagaaataaatgttccagcatacatagttgatccagttgttgtggatgagcttgatgaagtttcaagaatatcaggaatggctgacattccaagaaaaagtatattccatgcattaaatcaaaaagcagttgctagaagatatgcaaaagaagttggaaaaaaatacgaagatcttaatttaatcgtagtccacatgggtggaggtacttcagtaggtactcataaagatggtagagtaatagaagttaataatacacttgatggagaaggtccattctcaccagaaagaagtggtggagttccaataggagatcttgtaagattgtgcttcagcaacaaatatacttatgaagaagtaatgaaaaagataaacggcaaaggcggagttgttagttacttaaatactatcgattttaaggctgtagttgataaagctcttgaaggagataagaaatgtgcacttatatatgaagctttcacattccaggtagcaaaagagataggaaaatgttcaaccgttttaaaaggaaatgtagatgcaataatcttaacaggcggaattgcgtacaacgagcatgtatgtaatgccatagaggatagagtaaaattcatagcacctgtagttagatatggtggagaagatgaacttcttgcacttgcagaaggtggacttagagttttaagaggagaagaaaaagctaaggaatacaaataaactagcgaaggaggatcacatgtctattataaaaagctatgccgcaaaagaggcgggcagcgaactcgaactttacgaatatgatgccggtgaactcaggccggaagatgtcgaggtgcaggtcgactactgcggtatctgccattccgatctttccatgatcgacaacgaatggggattctctcagtatccgctggttgccgggcatgaagtgattggccgcgtggcggcgctcggcagtgcggcgcaggaaaaaggggtgaaagttggtcagcgcgtgggcgtaggctggacggcgcgcagctgtgggcattgcgatgcatgtatcagcggtaatcagattaactgcctggaaggcgccgtagccaccattctcaaccgtggcggttttgccgagaaactgcgggcagactggcagtgggtgatcccgcttccggagagcatcgatattgagtcggcaggtcctctgttatgcggcggtattacggtttttaaacctctgctgatgcaccacatcaccgcgaccagtcgcgtgggggtgatcggcatcggcggtcttgggcacattgccattaaactgttgcacgcaatgggctgtgaagtgaccgcattcagctcgaatccgtcgaaagaacaggaagtgctggcaatgggggcggataaagtcgtgaacagtcgcgatccagacgcgttaaatgcgctggcaggccagtttgatctcattatcaacaccgttaatgtcgacctcgactggcagccctactttgaagcgctggcctatggcggccatttccacaccgtcggcgcagtgatgaagccgctgccggttccggcgtttacattgattgctggcgatcgcagcatctccggctcagcaaccggtacgccctatgagctgcgcaaattgatgaagtttgccgggcgcagcaaggtctcgccgacgacagagctgttcccaatgtcgcaaatcaacgaagccatccagcacgttcgcgacggcaaagcgcgttaccgcgtggtactgcaagccgacttttgaatcgataggaggactaatgtatggttatgatggtaaagtattaagaattaatttaaaagaaagaacttgcaaatcagaaaatttagatttagataaagctaaaaagtttataggttgtaggggactaggtgttaaaactttatttgatgaaatagatcctaaaatagatgcattatcaccagaaaataaatttataattgtaacaggtcctttaactggagctccggttccaactagtggaaggtttatggtagttactaaagcaccgcttacaggaactataggaatttcaaattcgggtggaaaatggggagtagacttaaaaaaagctggttgggatatgataatagtagaggataaggctgattcaccagtttacattgaaatagtagatgataaggtagaaattaaagacgcgtcacagctttggggaaaagttacatcagaaactacaaaagagttagaaaagataactgagaataaatcaaaggtattatgtataggacctgctggtgaacgattgtctcttatggcagcagttatgaatgatgtagatagaactgcagcaagaggcggcgttggtgcagttatgggatctaaaaacttaaaagctattacagttaaaggaactggaaaaatagctttagctgataaagaaaaagtaaaaaaagtgtccgtagaaaaaattacaacattaaaaaatgatccagtagctggtcagggaatgccaacttatggtacagctatactggttaatataataaatgaaaatggagttcatcctgtaaagaattttcaagagtcttatacgaatcaagcagataaaataagtggagagactcttactgctaaccaactagtaaggaaaaatccttgttacagctgtcctataggttgtggaagatgggttagactaaaagatggcacagagtgcggaggaccagaatatgaaacactgtggtgttttggatctgactgtggttcatatgatttagatgctataaatgaagctaatatgttatgtaatgaatatggtattgatactattacttgtggtgcaacaattgctgcagctatggaactttatcaaagaggatatataaaagacgaagaaatagctggagataacctatctctcaagtggggtgatacggaatctatgattggctggataaagagaatggtatatagtgaaggctttggagcaaagatgacaaatggttcatataggctttgtgaaggttatggagcaccggagtattctatgacagttaaaaagcaggaaattccagcatatgatccaaggggaatacagggacacggtattacctatgcagttaataatagaggaggctgtcatattaagggatatatgattaaccctgaaatattaggttatcctgaaaaacttgatagatttgcattagatggtaaagcagcttatgccaaattatttcatgatttaactgctgtaattgattctttaggattgtgcatattcactacatttgggcttggaatacaggattatgtagatatgtataatgcagtagtaggagaatctacttatgatgcagattcactattagaggcaggagatagaatctggactcttgagaaattatttaatcttgcagctggaatagacagcagccaggatactctaccaaagagattgttagaagaacctattccagatggcccatcaaagggagaagttcataggctagatgttcttctgccagaatattactcagtacgaggatggagtaaagagggtatacctacagaagaaacattaaagaaattaggattagatgaatatataggtaagttctagactgacaggaggacgtatggcgaccaccagcaccaccaccaaactgagcgtgctgtgctgcagctttattagcagcccgctggtggatagcccgccgagcctggcgttttttagcccgattccgcgctttctgaccgtgcgcattgcgaccagctttcgcagcagcagccgctttccggcgaccaaaattcgcaaaagcagcctggcggcggtgatgtttccggaaaacagcgtgctgagcgatgtgtgcgcgtttggcgtgaccagcattgtggcgtttagctgcctgggcttttggggcgaaattggcaaacgcggcatttttgatcagaaactgattcgcaaactggtgcatattaacattggcctggtgtttatgctgtgctggccgctgtttagcagcggcattcagggcgcgctgtttgcgagcctggtgccgggcctgaacattgtgcgcatgctgctgctgggcctgggcgtgtatcatgatgaaggcaccattaaaagcatgagccgccatggcgatcgccgcgaactgctgaaaggcccgctgtattatgtgctgagcattaccagcgcgtgcatttattattggaaaagcagcccgattgcgattgcggtgatttgcaacctgtgcgcgggcgatggcatggcggatattgtgggccgccgctttggcaccgaaaaactgccgtataacaaaaacaaaagctttgcgggcagcattggcatggcgaccgcgggctttctggcgagcgtggcgtatatgtattattttgcgagctttggctatattgaagatagcggcggcatgattctgcgctttctggtgattagcattgcgagcgcgctggtggaaagcctgccgattagcaccgatattgatgataacctgaccattagcctgaccagcgcgctggcgggctttctgctgtaaagcatgaggaggactagaatttcagttcattattttgagctgcctcactttttggtatatcatatcatatcgaataggaatggctctgctctctgtcgcaccgcgggctcccagatggtgcgtgcacaaatcattggtcacttctagcaagggtaaggttgtccgcagaacgatctcaacttccatccgcatgtgtcggataaccactgaatccggtgaaggcgtacagagacgcatagcaaatcatcattccaacctctgggacgataatttcatacagtccctctcaacgccttatggggcaatttcgtaccatgaaagtgctcagaaacttattggagaagtaaaagagatgatcaattcaatctcggttaaagatggagaattaatcaccccctccaatgatctccttatgcggctctctatagttgatagcattgaacgtttgggaatcgataggcatttcaaaagtgaaataaaatcagctctggattatgtttacagttattggaacgaaaaaggcattgggtggggaagagatagtgttgttgccgatctcaactcaactgccttggggcttcgaactctacgactacacggatacccggtgtcttcagatgtgttacaacacttcaaagaacaaaaagggcagtttgcatgttcggccattcaaacagagggagagataagaagtgttctcaacttatttcgggcttcccaaattgcctttccgggagagaaagttatggaagaggcagaagtcttctctacaatatatttaaaagaagccatactaaagcttccggtctgcggtctttcacgagagatatcgtacgttctggaatatggttggcatataaatttgccaagattggaagcaaggaactacatcgacgtatttggagaggaccccatttatttgacgccaaatatgaagacccaaaaacttctagaacttgcaaagttggagttcaatatgtttcactctttacaacagcaagagctaaagcttctctccagatggtggaaagattcgggtttctctcaaatgaccttccctcggcatcgtcacgtggaatattacactttggcatcttgcattgatagtgaacctcaacattcttcgttcagacttggatttgccaaaatctttcatcttgccacggttcttgacgatatttacgacacctttggcacgatggatgagctagaactcttcacggcggcagttaagaggtggcatccgtctgcgacggagtggcttccagaatatatgaaaggagtatatatggtgctttacgaaaccgttaacgaaatggcaggagaagcagaaaagtctcaaggccgagacacgctcaactatggccgaaatgctttggaggcttatattgatgcttctatggaagaagcgaagtggattttcagtggttttttgccaacatttgaggagtacctggataacgggaaagttagtttcggttatggcattggcacattgcaacccattctgacgttgggcattccctttcctcatcacatcctacaagaaatagactttccttccaggctcaatgatgtggcatcttccattctccgactaaaaggcgacattcacacttaccaggctgagaggagccgtggagaaaaatcttcgtgtatatcatgttatacggaagagaatcccgagtcaacagaggaagatgcaatcaatcatatcaactccatggtcgacaaattactcaaggaactaaattgggagtatctgagacctgatagcaatgttccaatcacttccaagaaacatgcatttgacattctgagagctttctaccatctctacaaataccgagatggcttcagcgttgcgaactatgaaataaagaatttggtcatgacaaccgtcattgagcctgtgcctttataaacagacaggaggacatacatgacgttaggaattgataaaatcaacttctatgtccccaaatattacgtggatatggcgaaattagcagaggcaagacaagttgatcccaacaagttcctcatcggtattggacagactgaaatggctgtttctcctgtcaatcaggacattgtaagtatgggtgcaaatgcagctaaggacataatcacagatgaggacaaaaagaaaatcggaatggtaatagtcgcaacagaatctgcagtagatgcagctaaagcagcagcagttcaaattcacaatttattagggattcaaccttttgcgagatgtttcgaaatgaaggaagcatgttatgctgcaactccagctatccaattggcaaaggactatctagctacaagacctaacgagaaagttttggtcatagctactgatactgctagatacggacttaactcaggaggtgaacctacacaaggtgcaggtgcagtagcaatggtcatatcccacaatcctagtatactcgcattaaacgaggatgcagttgcatatacggaagatgtgtacgacttttggagacctactggtcataagtaccctctagttgatggagctctttctaaggacgcttatatccgaagttttcaacagtcttggaatgagtatgcgaaaagacaaggcaaatccttagcagatttcgcaagtttatgcttccatgttcccttcactaaaatggggaaaaaagcgttagagtccatcatagataacgctgatgaaaccactcaagagagacttagatccggttatgaagatgctgtggactataaccgctatgttgggaacatttacacgggaagtttgtacctgtcactcatatccttgcttgagaatcgtgacttacaagcaggtgaaacgattggattgttctcgtatggaagtggtagtgtaggggagttttacagtgcgacgttagtagaaggctataaggaccatcttgatcaagctgcacataaagctctccttaataaccgtaccgaagttagtgtagatgcttacgagaccttctttaagaggtttgatgacgttgatttcgacgaacaacaagatgctgtacatgaagatcgtcatatcttctacctgagtaacatcgagaataacgtcagagagtaccatagaccagaatagacagtaggaggactagcatgacgcgtgaagtggtagtggtaagcggtgtccgtaccgcgatcgggacctttggcggcagcctgaaggatgtggcaccggcggagctgggcgcactggtggtgcgcgaggcgctggcgcgcgcgcaggtgtcgggcgacgatgtcggccacgtggtattcggcaacgtgatccagaccgagccgcgcgacatgtatctgggccgcgtcgcggccgtcaacggcggggtgacgatcaacgcccccgcgctgaccgtgaaccgcctgtgcggctcgggcctgcaggccattgtcagcgccgcgcagaccatcctgctgggcgataccgacgtcgccatcggcggcggcgcggaaagcatgagccgcgcaccgtacctggcgccggcagcgcgctggggcgcacgcatgggcgacgccggcctggtcgacatgatgctgggtgcgctgcacgatcccttccatcgcatccacatgggcgtgaccgccgagaatgtcgccaaggaatacgacatctcgcgcgcgcagcaggacgaggccgcgctggaatcgcaccgccgcgcttcggcagcgatcaaggccggctacttcaaggaccagatcgtcccggtggtgagcaagggccgcaagggcgacgtgaccttcgacaccgacgagcacgtgcgccatgacgccaccatcgacgacatgaccaagctcaggccggtcttcgtcaaggaaaacggcacggtcacggccggcaatgcctcgggcctgaacgacgccgccgccgcggtggtgatgatggagcgcgccgaagccgagcgccgcggcctgaagccgctggcccgcctggtgtcgtacggccatgccggcgtggacccgaaggccatgggcatcggcccggtgccggcgacgaagatcgcgctggagcgcgccggcctgcaggtgtcggacctggacgtgatcgaagccaacgaagcctttgccgcacaggcgtgcgccgtgaccaaggcgctcggtctggacccggccaaggttaacccgaacggctcgggcatctcgctgggccacccgatcggcgccaccggtgccctgatcacggtgaaggcgctgcatgagctgaaccgcgtgcagggccgctacgcgctggtgacgatgtgcatcggcggcgggcagggcattgccgccatcttcgagcgtatctgaaactaaggaggactaatgagtctgaatttccttgattttgaacagccgattgcagagctggaagcgaaaatcgattctctgactgcggttagccgtcaggatgagaaactggatattaacatcgatgaagaagtgcatcgtctgcgtgaaaaaagcgtagaactgacacgtaaaatcttcgccgatctcggtgcatggcagattgcgcaactggcacgccatccacagcgtccttataccctggattacgttcgcctggcatttgatgaatttgacgaactggctggcgaccgcgcgtatgcagacgataaagctatcgtcggtggtatcgcccgtctcgatggtcgtccggtgatgatcattggtcatcaaaaaggtcgtgaaaccaaagaaaaaattcgccgtaactttggtatgccagcgccagaaggttaccgcaaagcactgcgtctgatgcaaatggctgaacgctttaagatgccaatcatcacctttatcgacaccccgggggcttatccgggcgtgggcgcagaagagcgcggtcagtctgaagccattgcacgcaacctgcgtgaaatgtctcgccttagcgtaccgactatttgtaccgttatcggtgaaggtggttctggcggcgcgctggcgattggcgtgggcgataaagtgaatatgctgcaatacagcacctattccgttatctcgccggaaggttgtgcgtccattctgtggaagagcgctgataaagcgccgctggcggctgaagcgatgggtatcatcgctccgcgtctgaaagaactaaaactgatcgactccatcatcccagaaccgctgggtggtgctcaccgtaacccggaagcgatggcggcatcgttgaaagcgcaactgttggcggatctggccgatctcgacgtgttaagcactgaagatttaaaaaatcgtcgttatcagcgcctgatgagctacggttacgcgtaataaggaggaacccactcatggatattcgtaagattaaaaaactgatcgagctggttgaagaatcaggcatctccgaactggaaatttctgaaggcgaagagtcagtacgcattagccgtgcagctcctgccgcaagtttccctgtgatgcaacaagcttacgctgcaccaatgatgcagcagccagctcaatctaacgcagccgctccggcgaccgttccttccatggaagcgccagcagcagcggaaatcagtggtcacatcgtacgttccccgatggttggtactttctaccgcaccccaagcccggacgcaaaagcgttcatcgaagtgggtcagaaagtcaacgtgggcgataccctgtgcatcgttgaagccatgaaaatgatgaaccagatcgaagcggacaaatccggtaccgtgaaagcaattctggtcgaaagtggacaaccggtagaatttgacgagccgctggtcgtcatcgagtaacgaggcgaacatgctggataaaattgttattgccaaccgcggcgagattgcattgcgtattcttcgtgcctgtaaagaactgggcatcaagactgtcgctgtgcactccagcgcggatcgcgatctaaaacacgtattactggcagatgaaacggtctgtattggccctgctccgtcagtaaaaagttatctgaacatcccggcaatcatcagcgccgctgaaatcaccggcgcagtagcaatccatccgggttacggcttcctctccgagaacgccaactttgccgagcaggttgaacgctccggctttatcttcattggcccgaaagcagaaaccattcgcctgatgggcgacaaagtatccgcaatcgcggcgatgaaaaaagcgggcgtcccttgcgtaccgggttctgacggcccgctgggcgacgatatggataaaaaccgtgccattgctaaacgcattggttatccggtgattatcaaagcctccggcggcggcggcggtcgcggtatgcgcgtagtgcgcggcgacgctgaactggcacaatccatctccatgacccgtgcggaagcgaaagctgctttcagcaacgatatggtttacatggagaaatacctggaaaatcctcgccacgtcgagattcaggtactggctgacggtcagggcaacgctatctatctggcggaacgtgactgctccatgcaacgccgccaccagaaagtggtcgaagaagcgccagcaccgggcattaccccggaactgcgtcgctacatcggcgaacgttgcgctaaagcgtgtgttgatatcggctatcgcggtgcaggtactttcgagttcctgttcgaaaacggcgagttctatttcatcgaaatgaacacccgtattcaggtagaacacccggttacagaaatgatcaccggcgttgacctgatcaaagaacagctgcgtatcgctgccggtcaaccgctgtcgatcaagcaagaagaagttcacgttcgcggccatgcggtggaatgtcgtatcaacgccgaagatccgaacaccttcctgccaagtccgggcaaaatcacccgtttccacgcacctggcggttttggcgtacgttgggagtctcatatctacgcgggctacaccgtaccgccgtactatgactcaatgatcggtaagctgatttgctacggtgaaaaccgtgacgtggcgattgcccgcatgaagaatgcgctgcaggagctgatcatcgacggtatcaaaaccaacgttgatctgcagatccgcatcatgaatgacgagaacttccagcatggtggcactaacatccactatctggagaaaaaactcggtcttcaggaaaaataatataggaggatataacatgagctggattgaacgaattaaaagcaacattactcccacccgcaaggcgagcattcctgaaggggtgtggactaagtgtgatagctgcggtcaggttttataccgcgctgagctggaacgtaatcttgaggtctgtccgaagtgtgaccatcacatgcgtatgacagcgcgtaatcgcctgcatagcctgttagatgaaggaagccttgtggagctgggtagcgagcttgagccgaaagatgtgctgaagtttcgtgactccaagaagtataaagaccgtctggcatctgcgcagaaagaaaccggcgaaaaagatgcgctggtggtgatgaaaggcactctgtatggaatgccggttgtcgctgcggcattcgagttcgcctttatgggcggttcaatggggtctgttgtgggtgcacgtttcgtgcgtgccgttgagcaggcgctggaagataactgcccgctgatctgcttctccgcctctggtggcgcacgtatgcaggaagcactgatgtcgctgatgcagatggcgaaaacctctgcggcactggcaaaaatgcaggagcgcggcttgccgtacatctccgtgctgaccgacccgacgatgggcggtgtttctgcaagtttcgccatgctgggcgatctcaacatcgctgaaccgaaagcgttaatcggctttgccggtccgcgtgttatcgaacagaccgttcgcgaaaaactgccgcctggattccagcgcagtgaattcctgatcgagaaaggcgcgatcgacatgatcgtccgtcgtccggaaatgcgcctgaaactggcgagtattctggcgaagttgatgaatctgccagcgccgaatcctgaagcgccgcgtgaaggcgtagtggtacccccggtaccggatcaggaacctgaggcctgagactaggaggatcttaaatgaccgacgtccgattccgcattatcggtacgggtgcctacgtaccggaacggatcgtctccaacgatgaagtcggcgcgccggccggggtggacgacgactggatcacccgcaagaccggtatccggcagcgtcgctgggccgccgacgaccaggccacctcggacctggccacggccgcggggcgggcagcgctgaaagcggcgggcatcacgcccgagcagctgaccgtgatcgcggtcgccacctccacgccggaccggccgcagccgcccacggcggcctatgtccagcaccacctcggtgcgaccggcactgcggcgttcgacgtcaacgcggtctgctccggcaccgtgttcgcgctgtcctcggtggcgggcaccctcgtgtaccggggcggttacgcgctggtcatcggcgcggacctgtactcgcgcatcctcaacccggccgaccgcaagacggtcgtgctgttcggggacggcgccggcgcaatggtcctcgggccgacctcgaccggcacgggccccatcgtccggcgcgtcgccctgcacaccttcggcggcctcaccgacctgatccgtgtgcccgcgggcggcagccgccagccgctggacacggatggcctcgacgcgggactgcagtacttcgcgatggacgggcgtgaggtgcgccgcttcgtcacggagcacctgccgcagctgatcaagggcttcctgcacgaggccggggtcgacgccgccgacatcagccacttcgtgccgcatcaggccaacggtgtcatgctcgacgaggtcttcggcgagctgcatctgccgcgggcgaccatgcaccggacggtcgagacctacggcaacacgggagcggcctccatcccgatcaccatggacgcggccgtgcgcgccggttccttccggccgggcgagctggtcctgctggccgggttcggcggcggcatggccgcgagcttcgccctgatcgagtggtaggctatcataaaaataagaagcctgcatttgcaggcttcttatttttat

SEQ ID NO: 45 - DNA, 30675 bp, artificial sequence
  plasmid SG705
aaggccagcaaaaggccaggaaccgtaaaaaggccgcgttgctggcgtttttccataggctccgcccccctgacgagcatcacaaaaatcgacgctcaagtcagaggtggcgaaacccgacaggactataaagataccaggcgtttccccctggaagctccctcgtgcgctctcctgttccgaccctgccgcttaccggatacctgtccgcctttctcccttcgggaagcgtggcgctttctcatagctcacgctgtaggtatctcagttcggtgtaggtcgttcgctccaagctgggctgtgtgcacgaaccccccgttcagcccgaccgctgcgccttatccggtaactatcgtcttgagtccaacccggtaagacacgacttatcgccactggcagcagccactggtaacaggattagcagagcgaggtatgtaggcggtgctacagagttcttgaagtggtggcctaactacggctacactagaagaacagtatttggtatctgcgctctgctgaagccagttaccttcggaaaaagagttggtagctcttgatccggcaaacaaaccaccgctggtagcggtggtttttttgtttgcaagcagcagattacgcgcagaaaaaaaggatctcaagaagatcctttgatcttttctacggggtctgacgctcagtggaacgaaaactcacgttaagggattttggtcatgagattatcaaaaaggatcttcacctagatccttttaaattaaaaatgaagttttaaatcaatctaaagtatatatgagtaaacttggtctgacagctcttcctttttcaatattattgaagcatttatcagggttattgtctcatgagcggatacatatttgaatgtatttagaaaaataaacaaataggggttccgcgcacatttccccgaaaagtgccacctgacggtcctaaatttatattttttactttataatatataattgattatagaatccaaattagataggaggaccaggtaaatggagaataattttattgtcaacgaaaacgagaaaagggttttaaagcagatatttaacaactccaatatcagtagaactcaaatttccaagaatttagaactgaataaagcaacaatttcgaacattcttaacaatctaaagcataaaagtttggtaaatgaagttggtgaaggaaattctactaaaagtggtggaagaaaacctatacttctcgaaattaatcaaaagtatgggtattatataagcatggatttgacatatgattctgttgagttaatgtataactattttgatgctacaattctcaaacaagatagttatgaactgaatgataagaatgtaagtagcatattacagatactcaaatctaacataaatgttagcgaaaaatacgacacattatacggtttattagggataagtatatccatacatgggattgtagatgatgaacaaaacatcattaatctaccatttcacaagaatgaaaaaagaacgtttactgatgaacttaagtctttcactaatgtaccagtggttattgaaaatgaggcaaatttaagtgcattatacgagaaaagtttatacatcaattcgaatattaacaacttgatcacattgtctatacataaaggtataggagctggcatcataatcaataagaaactctatagaggtagtaatggagaagctggagaaataggaaagactcttgttttagagtctatcaataacaatgataacaagtactataaaatagaggatatttgtagtcaagacgctttgatacaaaagattaataacagattaggagttacacttacatttaccgaactaatacagtattataacgaaggaaatagtattgtagctcatgaaatcaaacagtttatcaacaaaatgactgtcttaatacacaatcttaatactcagtttaatccagatgcaatatacatcaattgtcccttgattaatgaacttcctaatattctaaacgaaatcaaagaacaattctcttgtttttcacaaggaagtcctatacaattgcatttaaccactaatgttaaacaagctacattattaggtggaacattagcaattatgcagaaaacccttaacataaacaatatccaaatgaatattaaatagttacagcagtctgagttataaaatagatatctcggaccgtctattcttccttatttgagtgggtaccaatgaaatctttcgagctaaatcgatttctggcccactcttttttattttttagtaagcgtttacaaaaaatgaacaatgtgctatattacctctaaagttagtttgtttattaaattaaccaactaaaatgtcgggatccttactgcaataggttgctactgttttatcatgaatcatcaacgaatgtattttgcatatttcagtatctttaataaactctttgcaatttttacaagttttcatatacgcccttcttttcataaattaatttatgaattctatgtattccaaggagcttttggatccaattaggaggaatctgcgatggaaaagaaggaatttagagttttaataaagtattgttttcttaaaggaaagaatacagtagaagctaagacttggttagataatgaatttccagattctgctcctggtaaaagtacaattatagattggtatgcaaaatttaaaagaggagaaatgtcaacagaagatggagaaagatctggtagaccaaaagaagttgtaactgatgaaaatataaagaagatacataaaatgatattaaatgatagaaagatgaagttaatagaaatagcagaagctttaaaaatatctaaagaaagagttggacatataatacatcaatatttagatatgagaaaattatgtgcaaaatgggttccaagagaattaacttttgatcaaaagcaaagaagagtagatgatagtaagagatgtttacaattattaacaagaaatactccagaatttttcagaagatatgtaacaatggatgaaacttggttacatcattatacacctgaaagtaatagacaatcagcagaatggacagctactggagaaccatcacctaaaagaggaaagactcaaaagagtgctggaaaggttatggcatcagtattttgggatgctcatggtataatatttatagattatttagaaaaaggaaaaacaataaattctgattattatatggcattattagaaagattaaaagttgaaatagcagctaaaagaccacatatgaagaagaaaaaagtattatttcatcaagataatgctccttgtcataagtcattaagaactatggcaaagatacatgaattaggttttgaattattaccacatccaccttattcaccagatttagctccttctgatttctttttatttagtgatttaaagagaatgttagcaggaaagaagtttggttgtaatgaagaagttatagcagaaacagaagcttattttgaagcaaaacctaaggaatattatcaaaatggaataaagaagttagaaggtagatataatagatgtatagcattagaaggaaattatgtagaataagaattccttaattaaggagctcgataaaaataagaagcctgcatttgcaggcttcttatttttatgcatcagctcttatatattaagctaccaacttagtatataagccaaaacttaaatgtgctaccaacacatcaagccgttagagaactctatctatagcaatatttcaaatgtaccgacatacaagagaaacattaactatatatattcaatttatgagattatcttaacagatataaatgtaaattgcaataagtaagatttagaagtttatagcctttgtgtattggaagcagtacgcaaaggcttttttatttgataaaaattagaagtatatttattttttcataattaatttatgaaaatgaaagggggtgagcaaagtgacagaggaaagcagtatcttatcaaataacaaggtattagcaatatcattattgactttagcagtaaacattatgacttttatagtgcttgtagctaagtagtacgaaagggggagctttaaaaagctccttggaatacatagaattcataaattaatttatgaaaagaagggcgtatatgaaaacttgtaaaaattgcaaagagtttattaaagatactgaaatatgcaaaatacattcgttgatgattcatgataaaacagtagcaacctattgcagtaaatacaatgagtcaagatgtttacataaagggaaagtccaatgtattaattgttcaaagatgaaccgatatggatggtgtgccataaaaatgagatgttttacagaggaagaacagaaaaaagaacgtacatgcattaaatattatgcaaggagctttaaaaaagctcatgtaaagaagagtaaaaagaaaaaataatttatttattaatttaatattgagagtgccgacacagtatgcactaaaaaatatatctgtggtgtagtgagccgatacaaaaggatagtcactcgcattttcataatacatcttatgttatgattatgtgtcggtgggacttcacgacgaaaacccacaataaaaaaagagttcggggtagggttaagcatagttgaggcaactaaacaatcaagctaggatatgcagtagcagaccgtaaggtcgttgtttaggtgtgttgtaatacatacgctattaagatgtaaaaatacggataccaatgaagggaaaagtataatttttggatgtagtttgtttgttcatctatgggcaaactacgtccaaagccgtttccaaatctgctaaaaagtatatcctttctaaaatcaaagtcaagtatgaaatcataaataaagtttaattttgaagttattatgatattatgtttttctattaaaataaattaagtatatagaatagtttaataatagtatatacttaatgtgataagtgtctgacagtgtcacagaaaggatgattgttatggattataagcggccggccagtgggcaagttgaaaaattcacaaaaatgtggtataatatctttgttcattagagcgataaacttgaatttgagagggaacttagatggtatttgaaaaaattgataaaaatagttggaacagaaaagagtattttgaccactactttgcaagtgtaccttgtacctacagcatgaccgttaaagtggatatcacacaaataaaggaaaagggaatgaaactatatcctgcaatgctttattatattgcaatgattgtaaaccgccattcagagtttaggacggcaatcaatcaagatggtgaattggggatatatgatgagatgataccaagctatacaatatttcacaatgatactgaaacattttccagcctttggactgagtgtaagtctgactttaaatcatttttagcagattatgaaagtgatacgcaacggtatggaaacaatcatagaatggaaggaaagccaaatgctccggaaaacatttttaatgtatctatgataccgtggtcaaccttcgatggctttaatctgaatttgcagaaaggatatgattatttgattcctatttttactatggggaaatattataaagaagataacaaaattatacttcctttggcaattcaagttcatcacgcagtatgtgacggatttcacatttgccgttttgtaaacgaattgcaggaattgataaatagttaacttcaggtttgtctgtaactaaaaacaagtatttaagcaaaaacatcgtagaaatacggtgttttttgttaccctaagtttactctatcattgatagagtgcgactctatcattgatagagtccacaggttggctgataagtccccggtctgtaccgttcgtataatgtatgctatacgaagttataggaggttataatgaacgagaaaaatataaaacacagtcaaaactttattacttcaaaacataatatagataaaataatgacaaatataagattaaatgaacatgataatatctttgaaatcggctcaggaaaagggcattttacccttgaattagtacagaggtgtaatttcgtaactgccattgaaatagaccataaattatgcaaaactacagaaaataaacttgttgatcacgataatttccaagttttaaacaaggatatattgcagtttaaatttcctaaaaaccaatcctataaaatatttggtaatataccttataacataagtacggatataatacgcaaaattgtttttgatagtatagctgatgagatttatttaatcgtggaatacgggtttgctaaaagattattaaatacaaaacgctcattggcattatttttaatggcagaagttgatatttctatattaagtatggttccaagagaatattttcatcctaaacctaaagtgaatagctcacttatcagattaaatagaaaaaaatcaagaatatcacacaaagataaacagaagtataattatttcgttatgaaatgggttaacaaagaatacaagaaaatatttacaaaaaatcaatttaacaattccttaaaacatgcaggaattgacgatttaaacaatattagctttgaacaattcttatctcttttcaatagctataaattatttaataagtaagttaagggatgcataaactgcatcccttaacttgtttttcgtgtacctattttttgtgaatcgattatgtcttttgcgcattcgtcgacaattgcatatattgataaaaataataatagtgggtataattaagttgttaggaggttagttagaatgagtagactcgataagtctaaagtgataaattccgcattagaactccttaatgaagttggaattgaaggtctaactaccaggaaattagctcagaaacttggagttgaacaaccaacattgtactggcatgtcaaaaacaaaagagcactcttagatgcattagcaatcgaaatgttagacagacatcatacacacttttgtccattagaaggtgaaagttggcaagactttttgaggaataacgcgaaaagtttcagatgtgctttactatcccatagagatggggctaaagttcacttaggaactagacctacagaaaagcagtatgagacacttgaaaatcagttggcatttctatgtcaacaaggattctcattagagaacgcattatatgctctttcagctgtaggtcatttcacgttaggttgtgttttggaagatcaagaacatcaagttgcaaaagaagagagagaaactcctactacagatagtatgccacctttattacgacaagctatagaactgtttgatcatcaaggagctgaacctgcgtttctctttggattggagttaataatttgcggactagagaaacagcttaagtgtgaaagtggatcttagttagcaccggtcagggtggtgaatgtgaaaccagtaacgttatacgatgtcgcagagtatgccggtgtctcttatcagaccgtttcccgcgtggtgaaccaggccagccacgtttctgcgaaaacgcgggaaaaagtggaagcggcgatggcggagctgaattacattcccaaccgcgtggcacaacaactggcgggcaaacagtcgttgctgattggcgttgccacctccagtctggccctgcacgcgccgtcgcaaattgtcgcggcgattaaatctcgcgccgatcaactgggtgccagcgtggtggtgtcgatggtagaacgaagcggcgtcgaagcctgtaaagcggcggtgcacaatcttctcgcgcaacgcgtcagtgggctgatcattaactatccgctggatgaccaggatgccattgctgtggaagctgcctgcactaatgttccggcgttatttcttgatgtctctgaccagacacccatcaacagtattattttctcccatgaagacggtacgcgactgggcgtggagcatctggtcgcattgggtcaccagcaaatcgcgctgttagcgggcccattaagttctgtctcggcgcgtctgcgtctggctggctggcataaatatctcactcgcaatcaaattcagccgatagcggaacgggaaggcgactggagtgccatgtccggttttcaacaaaccatgcaaatgctgaatgagggcatcgttcccactgcgatgctggttgccaacgatcagatggcgctgggcgcaatgcgcgccattaccgagtccgggctgcgcgttggtgcggacatctcggtagtgggatacgacgataccgaagacagctcatgttatatcccgccgttaaccaccatcaaacaggattttcgcctgctggggcaaaccagcgtggaccgcttgctgcaactctctcagggccaggcggtgaagggcaatcagctgttgcccgtctcactggtgaaaagaaaaaccaccctggcgcccaatacgcaaaccgcctctccccgcgcgttggccgattcattaatgcagctggcacgacaggtttcccgactggaaagcgggcagtgagcgcaacgcaattaatgtaagttagctcactcattaggcaccgggatctcgaccgatgcccttgagagccttcaacccagtcagctccttccggtgggcgcggggcatgactagcatgatcgtgctcctgtcgttgaggacccggctaggctggcggggttgccttactggttagcagaatgaatcaccgatacgcgataacttcgtataatgtatgctatacgaacggtagctcagctagcacccggaattgtgagcggataacaattccttggaattgtgagcggataacaattataattaagttgttaggagggaacttagatgaaaaattgtgtcatcgtcagtgcggtacgtactgctatcggtagttttaacggttcactcgcttccaccagcgccatcgacctgggggcgacagtaattaaagccgccattgaacgtgcaaaaatcgattcacaacacgttgatgaagtgattatgggtaacgtgttacaagccgggctggggcaaaatccggcgcgtcaggcactgttaaaaagcgggctggcagaaacggtgtgcggattcacggtcaataaagtatgtggttcgggtcttaaaagtgtggcgcttgccgcccaggccattcaggcaggtcaggcgcagagcattgtggcggggggtatggaaaatatgagtttagccccctacttactcgatgcaaaagcacgctctggttatcgtcttggagacggacaggtttatgacgtaatcctgcgcgatggcctgatgtgcgccacccatggttatcatatggggattaccgccgaaaacgtggctaaagagtacggaattacccgtgaaatgcaggatgaactggcgctacattcacagcgtaaagcggcagccgcaattgagtccggtgcttttacagccgaaatcgtcccggtaaatgttgtcactcgaaagaaaaccttcgtcttcagtcaagacgaattcccgaaagcgaattcaacggctgaagcgttaggtgcattgcgcccggccttcgataaagcaggaacagtcaccgctgggaacgcgtctggtattaacgacggtgctgccgctctggtgattatggaagaatctgcggcgctggcagcaggccttacccccctggctcgcattaaaagttatgccagcggtggcgtgccccccgcattgatgggtatggggccagtacctgccacgcaaaaagcgttacaactggcggggctgcaactggcggatattgatctcattgaggctaatgaagcatttgctgcacagttccttgccgttgggaaaaacctgggctttgattctgagaaagtgaatgtcaacggcggggccatcgcgctcgggcatcctatcggtgccagtggtgctcgtattctggtcacactattacatgccatgcaggcacgcgataaaacgctggggctggcaacactgtgcattggcggcggtcagggaattgcgatggtgattgaacggttgaattaagaggtaagtttataggaggaattccatatgatatggaaacggaaaatcaccctggaagcactgaatgctatgggtgaaggaaacatggtggggttcctggatattcgctttgaacatattggtgatgacacccttgaagcgacaatgccagtagactcgcggacaaagcagcctttcgggttgctgcatggaggagcatccgtggtactggccgaaagtatcggttccgttgccggttatttatgtaccgaaggtgagcaaaaagtggttggtctggaaatcaatgctaaccacgtccgctcggcacgagaagggcgggtgcgcggcgtatgcaaaccgttgcatctcggttcgcgtcaccaggtctggcagattgaaatcttcgatgagaaagggcgtttgtgctgttcgtcacgattgacgaccgccattttgtgaatttacacgatcgacgtgctcagctagcacccggaattgtgagcggataacaattccttggaattgtgagcggataacaattataattaagttgttaggaggttagaatgacgttaggaattgataaaatcaacttctatgtccccaaatattacgtggatatggcgaaattagcagaggcaagacaagttgatcccaacaagttcctcatcggtattggacagactgaaatggctgtttctcctgtcaatcaggacattgtaagtatgggtgcaaatgcagctaaggacataatcacagatgaggacaaaaagaaaatcggaatggtaatagtcgcaacagaatctgcagtagatgcagctaaagcagcagcagttcaaattcacaatttattagggattcaaccttttgcgagatgtttcgaaatgaaggaagcatgttatgctgcaactccagctatccaattggcaaaggactatctagctacaagacctaacgagaaagttttggtcatagctactgatactgctagatacggacttaactcaggaggtgaacctacacaaggtgcaggtgcagtagcaatggtcatatcccacaatcctagtatactcgcattaaacgaggatgcagttgcatatacggaagatgtgtacgacttttggagacctactggtcataagtaccctctagttgatggagctctttctaaggacgcttatatccgaagttttcaacagtcttggaatgagtatgcgaaaagacaaggcaaatccttagcagatttcgcaagtttatgcttccatgttcccttcactaaaatggggaaaaaagcgttagagtccatcatagataacgctgatgaaaccactcaagagagacttagatccggttatgaagatgctgtggactataaccgctatgttgggaacatttacacgggaagtttgtacctgtcactcatatccttgcttgagaatcgtgacttacaagcaggtgaaacgattggattgttctcgtatggaagtggtagtgtaggggagttttacagtgcgacgttagtagaaggctataaggaccatcttgatcaagctgcacataaagctctccttaataaccgtaccgaagttagtgtagatgcttacgagaccttctttaagaggtttgatgacgttgatttcgacgaacaacaagatgctgtacatgaagatcgtcatatcttctacctgagtaacatcgagaataacgtcagagagtaccatagaccagaatagacataggaggacgatatgagcgatttcagcaccctcgaagtgatccgcgacccgcgcggcttcgccaccctgtggttaagccgtgaggacaagaacaacgccttcaatgcgcagatgatccgcgagctgatcgtggccatcgaccagttggccgaagacgccagcctgcgctttgtgctgctgcgcggccgtggccggcacttcagcgccggtgccgacctggcctggatgcagcagtcggcgcaactggacttcaacaccaacctggatgatgcccacgaactgggcgagctgatgtacgccctgcatcgcctcaaggccccgaccctggccgtggtgcaaggtgcagcctttggcggcgcgctgggcctgatcagctgctgcgacatggccatcggcgccgaagacgcccaactgtgcctgtcggaagtacgcatcggcctggccccggcggtcatcagcccgttcgtggtcaaggccattggcgaacgcgccgcgcgccgctacgccctcaccgccgagcgtttcactggcgtgcgcgcacgcgagctgggcctgctggccgaggtgtacccggccagcgaactggacgaccacgtcgaagcctgggtaagcaacctgctgcagaacagcccgcaagcattgcgcgccaccaaggacttgctgcgcgaagtggacgacggcgaactcagcccggccctgcgccgttactgcgaaaacaccatcgcccgtatccgcgtcagcgccgaaggccaggagggcctgcgcgctttcctggaaaaacgccgccctgcctggcaaaccgttgacaagaaggagccgcgcccatgaactacgaggaggactacatgaagacggcgcgctggtgctcgctggaggaggcggtggcttccattccggatggcgcgtcgctggccaccggcggtttcatgctgggtcgcgcccccatggcgctggtgatggagctcatcgcgcagggcaagcgcgacctgggcctcatctccctccccaacccgctgcccgcggagttcctcgtggcgggcggctgtctggccaggctggagattgccttcggcgcgctgagcctccagggccgcgtgcgtcccatgccctgcctcaagcgggccatggagcaaggcaccctcgcctggcgcgaacatgatggctaccgcgtcgtccagcggctgcgcgccgcgtccatggggctgcccttcatccccgcgccggacgcggacgtgtccgggctggcacggacggagccgcctcccacggtggaggaccccttcaccggcctgcgcgtggcggtggagcctgccttctatccggacgtggcgttgctccacgcgcgcgccgcggacgagcgcggcaacctctacatggaagacccgaccacggacctgctggtggcgggcgcggcgaagcgggtgattgccacggtggaggagcgggtggcgaagctgcctcgcgccaccctgcccggcttccaggtggaccgcatcgtcctggctcccggcggcgccctgcccaccggctgcgccggactctacccgcacgacgacgaaatgctggcccgctacctgtcgctggcggagacgggccgtgaagcggagttcctggaaacgttgctgacgcggagggcggcatgaacgtaaggaggattcaatgagcgcgacgctggacatcaccccagcggagaccgtggtctccctgctggcgcggcagattgatgacggcggcgtggtggccacgggcgtggcgtcaccgctggccatcctggccatcgccgtggcgcgcgcgacgcacgcgccggacctgacgtacctggcctgcgtgggctcgttggatccggagattcccacgctgctgccctcctccgaggacctgggctacctggatggccggtccgcggaaatcaccattccggacctgttcgaccacgcgcggcgcggccgggtggacaccgtcttcttcggcgcggccgaggtggatgccgagggccgcaccaacatgacggccagcggcagcctggacaagccgcggacgaagttccccggcgtggcgggcgcagcgacgctgcggcagtgggtgcgccggccggtgctgttggtgccgcgccagtcgcgccgcaacctggtgccggaggtgcaggtcgccaccacgagagatccgcgccggccggtgacgctcatctccgacctgggcgtgttcgaactgggcgcgtccggcgcgcggctgctcgcgcgacacccctgggcctcggaagagcacatcgcggagcgcacgggcttcgccttccaggtctccgaagcgctgtccgtcacctcgcttccggatgcccggacggtggcggccattcgcgccatcgatccgcacggctaccgcgacgcgctcgtcggcgcctgaaacgtacgaggaggactaatgaaagttacaaatcaaaaagaactaaaacaaaagctaaatgaattgagagaagcgcaaaagaagtttgcaacctatactcaagagcaagttgataaaatttttaaacaatgtgccatagccgcagctaaagaaagaataaacttagctaaattagcagtagaagaaacaggaataggtcttgtagaagataaaattataaaaaatcattttgcagcagaatatatatacaataaatataaaaatgaaaaaacttgtggcataatagaccatgacgattctttaggcataacaaaggttgctgaaccaattggaattgttgcagccatagttcctactactaatccaacttccacagcaattttcaaatcattaatttctttaaaaacaagaaacgcaatattcttttcaccacatccacgtgcaaaaaaatctacaattgctgcagcaaaattaattttagatgcagctgttaaagcaggagcacctaaaaatataataggctggatagatgagccatcaatagaactttctcaagatttgatgagtgaagctgatataatattagcaacaggaggtccttcaatggttaaagcggcctattcatctggaaaacctgcaattggtgttggagcaggaaatacaccagcaataatagatgagagtgcagatatagatatggcagtaagctccataattttatcaaagacttatgacaatggagtaatatgcgcttctgaacaatcaatattagttatgaattcaatatacgaaaaagttaaagaggaatttgtaaaacgaggatcatatatactcaatcaaaatgaaatagctaaaataaaagaaactatgtttaaaaatggagctattaatgctgacatagttggaaaatctgcttatataattgctaaaatggcaggaattgaagttcctcaaactacaaagatacttataggcgaagtacaatctgttgaaaaaagcgagctgttctcacatgaaaaactatcaccagtacttgcaatgtataaagttaaggattttgatgaagctctaaaaaaggcacaaaggctaatagaattaggtggaagtggacacacgtcatctttatatatagattcacaaaacaataaggataaagttaaagaatttggattagcaatgaaaacttcaaggacatttattaacatgccttcttcacagggagcaagcggagatttatacaattttgcgatagcaccatcatttactcttggatgcggcacttggggaggaaactctgtatcgcaaaatgtagagcctaaacatttattaaatattaaaagtgttgctgaaagaagggaaaatatgctttggtttaaagtgccacaaaaaatatattttaaatatggatgtcttagatttgcattaaaagaattaaaagatatgaataagaaaagagcctttatagtaacagataaagatctttttaaacttggatatgttaataaaataacaaaggtactagatgagatagatattaaatacagtatatttacagatattaaatctgatccaactattgattcagtaaaaaaaggtgctaaagaaatgcttaactttgaacctgatactataatctctattggtggtggatcgccaatggatgcagcaaaggttatgcacttgttatatgaatatccagaagcagaaattgaaaatctagctataaactttatggatataagaaagagaatatgcaatttccctaaattaggtacaaaggcgatttcagtagctattcctacaactgctggtaccggttcagaggcaacaccttttgcagttataactaatgatgaaacaggaatgaaataccctttaacttcttatgaattgaccccaaacatggcaataatagatactgaattaatgttaaatatgcctagaaaattaacagcagcaactggaatagatgcattagttcatgctatagaagcatatgtttcggttatggctacggattatactgatgaattagccttaagagcaataaaaatgatatttaaatatttgcctagagcctataaaaatgggactaacgacattgaagcaagagaaaaaatggcacatgcctctaatattgcggggatggcatttgcaaatgctttcttaggtgtatgccattcaatggctcataaacttggggcaatgcatcacgttccacatggaattgcttgtgctgtattaatagaagaagttattaaatataacgctacagactgtccaacaaagcaaacagcattccctcaatataaatctcctaatgctaagagaaaatatgctgaaattgcagagtatttgaatttaaagggtactagcgataccgaaaaggtaacagccttaatagaagctatttcaaagttaaagatagatttgagtattccacaaaatataagtgccgctggaataaataaaaaagatttttataatacgctagataaaatgtcagagcttgcttttgatgaccaatgtacaacagctaatcctaggtatccacttataagtgaacttaaggatatctatataaaatcattttaaactgacaggaggactaatggaatcgacccgcatgctgcggcagccgatacagttgttgcaggggcacaagggaccggtcacggcctcgcgccaccgccgcaatgccgtggtgtatgcactgctgtgcctgctggcgctgctaccggtggccaccggccagtcggcggcgtggcaggccgccgggctggggctgttcatgcccggcgccggtttcctggcgctgggtggcgcctgggcgttgctgttcccgctgacggtgttcgtcttctggctggcggtcattgcctggttctggtcgggcatggtggtggcgccgctgaccctctggctgggcaccgccgcgctggccggctggctggcgggcgaggcgatctggccgccggcggtgtatctggcgccggccgccgccgccgccaccttcctgttcttccagtatcgcggcgccaagcggcgggccaaggaccgcgagcacttcaagttccgccaaagtttcttcgccgagtcgctggcggaggtgcaccagcgcgccgccaccgaaccggagccgggcgagcgcgaactgacgccggaccagttgcagggcgtgcgctacctgctcgagctggccttgcagccggtcggccagtacaagggctacaccatcatcgaccagttccagccggccgccctgcgctaccagctcaaccacatcggcttcgcgctgggcatggtgcaagggcattacacgcccaacttccagggctatctgggccaggcgcagcgcaacgtgatcgacacttaccgcgagcgcaaggtgtggggctactgggtgtacgagtcgatgtgggggcatttcaacttctccgacttcgatcccgcccgcaaggacaacatcatgctcaccggctggtacggcatgcatgtgggccagtacatgctcaatgccggcgacacccgctacagccagcccggcagcctgagcttccgcctcaacgacaagacctgctaccaccacgacatccattccatcaaccagtcggtgcgcgagaacttccagagttcggacttctgcctgtatccgtgcgagccgaactgggtgtacccggtctgcaacatgtacggcatgtcctcgctggcggtgtatgacacgctgttcgagcgccgcgacaccgcccaggtgctgcccaagtggctgcacatgctggacaccgagttcaccgaccagaaaggctcgctggtcggcttgcgctcatactggaccgggctggaaatgccgttctacaccggcgaggcgggcttcgccttcttcgccaacatcttctcgaccgatctggcgcgcaagctgtgggcggtggggcgcaaggaattgtcgatgtgcctgacgcaggacgccgagggccagacgcggctgactctgccgaaggaggcgctggccttcttcgacaccatcgacgccggcaactaccggccgggcaagctgttcgcctatgtggcggtgcagatgtgcgcgcgcgagttcggcgacgacgaactggccgaggcggcacgccgctcgatggaccaggattgcggcccggtggtcgagaacggcgtggcgcgctacaccaagggctcgacgctggccaacatctggggcgtggagggacggctgatgcgcaccggcgatttccgcaacagcttcgtcaaggggccgccgtcgtcggtgttcgacggtccgctgctgggtgatgcgcgctatccggaaatcctggtggcgaaggccttcagccgtggcgacgacctggaactggtgctgtacccgggggccggcgacgggccgcagacgctgggcttcgaacgcctcaagcccggcgtccgctatgtggtcgagggcgccgccagtggtgagttcaccgccgacgcggatggccgtgcgtcgctcgcggtcacgctcagcgggcgcactgcgctgcacatcaagccgggccactgaacgactcgaggaggactacggtgattaagagttttaatgaaattatcatgaaggtaaagagcaaagaaatgaaaaaagttgctgttgctgtagcacaagacgagccagtacttgaagcagtaagagatgctaagaaaaatggtattgcagatgctattcttgttggagaccatgacgaaatcgtgtcaatcgcgcttaaaataggaatggatgtaaatgattttgaaatagtaaacgagcctaacgttaagaaagctgctttaaaggcagtagagcttgtatcaactggaaaagctgatatggtaatgaagggacttgtaaatacagcaactttcttaagatctgtattaaacaaagaagttggacttagaacaggaaaaactatgtctcacgttgcagtatttgaaactgagaaatttgatagactattatttttaacagatgttgctttcaatacttatcctgaattaaaggaaaaaattgatatagtaaacaattcagttaaggttgcacatgcaataggaattgaaaatccaaaggttgctccaatttgtgcagttgaggttataaaccctaaaatgccatcaacacttgatgcagcaatgctttcaaaaatgagtgacagaggacaaattaaaggttgtgtagttgacggacctttagcacttgatatagctttatcagaagaagcagcacatcataagggagtaacaggagaagttgctggaaaagctgatatcttcttaatgccaaacatagaaacaggaaatgtaatgtataagactttaacatatacaactgattcaaaaaatggaggaatcttagttggaacttctgcaccagttgttttaacttcaagagctgacagccatgaaacaaaaatgaactctatagcacttgcagctttagttgcaggcaataaataaactggactaaggaggacgtaatgtatagattactaataatcaatcctggctcgacctcaactaaaattggtatttatgacgatgaaaaagagatatttgagaagactttaagacattcagctgaagagatagaaaaatataacactatatttgatcaatttcaattcagaaagaatgtaattttagatgcgttaaaagaagcaaacatagaagtaagttctttaaatgctgtagttggaagaggcggactcttaaagccaatagtaagtggaacttatgcagtaaatcaaaaaatgcttgaagaccttaaagtaggagttcaaggtcagcatgcgtcaaatcttggtggaattattgcaaatgaaatagcaaaagaaataaatgttccagcatacatagttgatccagttgttgtggatgagcttgatgaagtttcaagaatatcaggaatggctgacattccaagaaaaagtatattccatgcattaaatcaaaaagcagttgctagaagatatgcaaaagaagttggaaaaaaatacgaagatcttaatttaatcgtagtccacatgggtggaggtacttcagtaggtactcataaagatggtagagtaatagaagttaataatacacttgatggagaaggtccattctcaccagaaagaagtggtggagttccaataggagatcttgtaagattgtgcttcagcaacaaatatacttatgaagaagtaatgaaaaagataaacggcaaaggcggagttgttagttacttaaatactatcgattttaaggctgtagttgataaagctcttgaaggagataagaaatgtgcacttatatatgaagctttcacattccaggtagcaaaagagataggaaaatgttcaaccgttttaaaaggaaatgtagatgcaataatcttaacaggcggaattgcgtacaacgagcatgtatgtaatgccatagaggatagagtaaaattcatagcacctgtagttagatatggtggagaagatgaacttcttgcacttgcagaaggtggacttagagttttaagaggagaagaaaaagctaaggaatacaaataaactagcgaaggaggatcacatgtctattataaaaagctatgccgcaaaagaggcgggcagcgaactcgaactttacgaatatgatgccggtgaactcaggccggaagatgtcgaggtgcaggtcgactactgcggtatctgccattccgatctttccatgatcgacaacgaatggggattctctcagtatccgctggttgccgggcatgaagtgattggccgcgtggcggcgctcggcagtgcggcgcaggaaaaaggggtgaaagttggtcagcgcgtgggcgtaggctggacggcgcgcagctgtgggcattgcgatgcatgtatcagcggtaatcagattaactgcctggaaggcgccgtagccaccattctcaaccgtggcggttttgccgagaaactgcgggcagactggcagtgggtgatcccgcttccggagagcatcgatattgagtcggcaggtcctctgttatgcggcggtattacggtttttaaacctctgctgatgcaccacatcaccgcgaccagtcgcgtgggggtgatcggcatcggcggtcttgggcacattgccattaaactgttgcacgcaatgggctgtgaagtgaccgcattcagctcgaatccgtcgaaagaacaggaagtgctggcaatgggggcggataaagtcgtgaacagtcgcgatccagacgcgttaaatgcgctggcaggccagtttgatctcattatcaacaccgttaatgtcgacctcgactggcagccctactttgaagcgctggcctatggcggccatttccacaccgtcggcgcagtgatgaagccgctgccggttccggcgtttacattgattgctggcgatcgcagcatctccggctcagcaaccggtacgccctatgagctgcgcaaattgatgaagtttgccgggcgcagcaaggtctcgccgacgacagagctgttcccaatgtcgcaaatcaacgaagccatccagcacgttcgcgacggcaaagcgcgttaccgcgtggtactgcaagccgacttttgaatcgataggaggactaatgtatggttatgatggtaaagtattaagaattaatttaaaagaaagaacttgcaaatcagaaaatttagatttagataaagctaaaaagtttataggttgtaggggactaggtgttaaaactttatttgatgaaatagatcctaaaatagatgcattatcaccagaaaataaatttataattgtaacaggtcctttaactggagctccggttccaactagtggaaggtttatggtagttactaaagcaccgcttacaggaactataggaatttcaaattcgggtggaaaatggggagtagacttaaaaaaagctggttgggatatgataatagtagaggataaggctgattcaccagtttacattgaaatagtagatgataaggtagaaattaaagacgcgtcacagctttggggaaaagttacatcagaaactacaaaagagttagaaaagataactgagaataaatcaaaggtattatgtataggacctgctggtgaacgattgtctcttatggcagcagttatgaatgatgtagatagaactgcagcaagaggcggcgttggtgcagttatgggatctaaaaacttaaaagctattacagttaaaggaactggaaaaatagctttagctgataaagaaaaagtaaaaaaagtgtccgtagaaaaaattacaacattaaaaaatgatccagtagctggtcagggaatgccaacttatggtacagctatactggttaatataataaatgaaaatggagttcatcctgtaaagaattttcaagagtcttatacgaatcaagcagataaaataagtggagagactcttactgctaaccaactagtaaggaaaaatccttgttacagctgtcctataggttgtggaagatgggttagactaaaagatggcacagagtgcggaggaccagaatatgaaacactgtggtgttttggatctgactgtggttcatatgatttagatgctataaatgaagctaatatgttatgtaatgaatatggtattgatactattacttgtggtgcaacaattgctgcagctatggaactttatcaaagaggatatataaaagacgaagaaatagctggagataacctatctctcaagtggggtgatacggaatctatgattggctggataaagagaatggtatatagtgaaggctttggagcaaagatgacaaatggttcatataggctttgtgaaggttatggagcaccggagtattctatgacagttaaaaagcaggaaattccagcatatgatccaaggggaatacagggacacggtattacctatgcagttaataatagaggaggctgtcatattaagggatatatgattaaccctgaaatattaggttatcctgaaaaacttgatagatttgcattagatggtaaagcagcttatgccaaattatttcatgatttaactgctgtaattgattctttaggattgtgcatattcactacatttgggcttggaatacaggattatgtagatatgtataatgcagtagtaggagaatctacttatgatgcagattcactattagaggcaggagatagaatctggactcttgagaaattatttaatcttgcagctggaatagacagcagccaggatactctaccaaagagattgttagaagaacctattccagatggcccatcaaagggagaagttcataggctagatgttcttctgccagaatattactcagtacgaggatggagtaaagagggtatacctacagaagaaacattaaagaaattaggattagatgaatatataggtaagttctagatcgataggaggacgaatgcctatggacttaagagataataagcaaagccaaaagaaatggaaaaatagaactttaacttccagccttgaattcgctttaacggggatttttacggcttttaaagaagagcgtaatatgaaaaaacatgcagtgtcagctcttttagctgtcattgctggtttggtttttaaagtatcagtcattgagtggctttttcttttattaagtatttttttggttattacctttgaaattgtcaattcggctattgaaaatgtggttgatttggccagtgactatcatttttccatgttggctaaaaatgctaaggatatggctgcaggagctgttcttgtcatttcaggttttgctgccttgacaggcttgattatttttttattaaaaatttggtttttgctttttcattaagctcagctagcacccggaattgtgagcggataacaattccttggaattgtgagcggataacaattataattaagttgttaggaggttagaatgtgtgctactagtagtcagtttactcaaatcactgaacataattcgagaagaagtgctaattaccaacctaatctatggaatttcgagtttcttcaaagtttggaaaatgatttgaaggttgaaaaactagaagagaaagctacaaagttagaagaagaagttaggtgtatgatcaatcgagttgatactcaacctttatccttacttgaattaatagatgatgttcaaagattaggacttacctataagtttgagaaagacataatcaaagcgttagagaacatagtactattagacgaaaacaaaaagaataagtctgatttacatgctacagcactttcgtttagacttctaagacaacatggttttgaagttagtcaagatgtatttgagagatttaaagataaagaaggtggattttcaggagagttaaaaggtgatgttcaaggtttgttaagtctgtatgaagcatcttatttgggatttgaaggagaaaacctgttagaagaagctagaacattttcgataactcatctgaaaaataacctcaaagaaggaatcaacacaaaagttgctgaacaagtttctcatgcattagagttaccttatcatcagagattacatcgattagaagcaagatggtttttggacaaatacgaacctaaagaacctcatcatcagctcttgttagaacttgcaaagttagattttaatatggtccaaacattacaccaaaaggaattacaggatctaagtagatggtggactgaaatgggtttagctagtaaacttgactttgttagagacagattaatggaagtgtatttttgggcattaggaatggctcctgatccacaatttggtgaatgtagaaaagctgtaacgaaaatgttcggattagtaacgattatagatgatgtctatgatgtttacggtactttagatgaattgcaactctttacagatgcagttgaaagatgggatgtaaatgcaatcaatacgttaccagattacatgaagttatgctttttagcgttgtataataccgtcaatgatacttcatattccatacttaaggaaaaaggccacaataatctttcctatttaaccaagtcatggagagaattatgtaaggcatttttacaggaagcaaaatggtctaacaataaaataatcccagcattctctaaatatcttgaaaatgcttccgtatcatcttcaggagttgcattattagcaccatcttattttagcgtttgtcaacaacaagaagatatcagtgatcatgctctaagatccttaactgattttcatggattagtcagaagttcatgtgttatattccgtctttgtaatgatttagctacaagtgcagctgaattagaaagaggtgaaactacgaatagtattatatcctatatgcacgaaaatgatggaacaagtgaagaacaagctagagaagaattacgcaagttaattgatgcagaatggaagaaaatgaatcgtgaaagagtatctgatagcacattattacccaaagcttttatggagattgcagtaaatatggctagagtaagtcattgcacatatcagtatggagatggattaggtagacctgattatgctacagaaaatcgcataaaactcttattaatagatcctttcccaatcaatcagctaatgtatgtttagacgatagggaggactaatgagtctgaatttccttgattttgaacagccgattgcagagctggaagcgaaaatcgattctctgactgcggttagccgtcaggatgagaaactggatattaacatcgatgaagaagtgcatcgtctgcgtgaaaaaagcgtagaactgacacgtaaaatcttcgccgatctcggtgcatggcagattgcgcaactggcacgccatccacagcgtccttataccctggattacgttcgcctggcatttgatgaatttgacgaactggctggcgaccgcgcgtatgcagacgataaagctatcgtcggtggtatcgcccgtctcgatggtcgtccggtgatgatcattggtcatcaaaaaggtcgtgaaaccaaagaaaaaattcgccgtaactttggtatgccagcgccagaaggttaccgcaaagcactgcgtctgatgcaaatggctgaacgctttaagatgccaatcatcacctttatcgacaccccgggggcttatccgggcgtgggcgcagaagagcgcggtcagtctgaagccattgcacgcaacctgcgtgaaatgtctcgccttagcgtaccgactatttgtaccgttatcggtgaaggtggttctggcggcgcgctggcgattggcgtgggcgataaagtgaatatgctgcaatacagcacctattccgttatctcgccggaaggttgtgcgtccattctgtggaagagcgctgataaagcgccgctggcggctgaagcgatgggtatcatcgctccgcgtctgaaagaactaaaactgatcgactccatcatcccagaaccgctgggtggtgctcaccgtaacccggaagcgatggcggcatcgttgaaagcgcaactgttggcggatctggccgatctcgacgtgttaagcactgaagatttaaaaaatcgtcgttatcagcgcctgatgagctacggttacgcgtaataaggaggaacccactcatggatattcgtaagattaaaaaactgatcgagctggttgaagaatcaggcatctccgaactggaaatttctgaaggcgaagagtcagtacgcattagccgtgcagctcctgccgcaagtttccctgtgatgcaacaagcttacgctgcaccaatgatgcagcagccagctcaatctaacgcagccgctccggcgaccgttccttccatggaagcgccagcagcagcggaaatcagtggtcacatcgtacgttccccgatggttggtactttctaccgcaccccaagcccggacgcaaaagcgttcatcgaagtgggtcagaaagtcaacgtgggcgataccctgtgcatcgttgaagccatgaaaatgatgaaccagatcgaagcggacaaatccggtaccgtgaaagcaattctggtcgaaagtggacaaccggtagaatttgacgagccgctggtcgtcatcgagtaacgaggcgaacatgctggataaaattgttattgccaaccgcggcgagattgcattgcgtattcttcgtgcctgtaaagaactgggcatcaagactgtcgctgtgcactccagcgcggatcgcgatctaaaacacgtattactggcagatgaaacggtctgtattggccctgctccgtcagtaaaaagttatctgaacatcccggcaatcatcagcgccgctgaaatcaccggcgcagtagcaatccatccgggttacggcttcctctccgagaacgccaactttgccgagcaggttgaacgctccggctttatcttcattggcccgaaagcagaaaccattcgcctgatgggcgacaaagtatccgcaatcgcggcgatgaaaaaagcgggcgtcccttgcgtaccgggttctgacggcccgctgggcgacgatatggataaaaaccgtgccattgctaaacgcattggttatccggtgattatcaaagcctccggcggcggcggcggtcgcggtatgcgcgtagtgcgcggcgacgctgaactggcacaatccatctccatgacccgtgcggaagcgaaagctgctttcagcaacgatatggtttacatggagaaatacctggaaaatcctcgccacgtcgagattcaggtactggctgacggtcagggcaacgctatctatctggcggaacgtgactgctccatgcaacgccgccaccagaaagtggtcgaagaagcgccagcaccgggcattaccccggaactgcgtcgctacatcggcgaacgttgcgctaaagcgtgtgttgatatcggctatcgcggtgcaggtactttcgagttcctgttcgaaaacggcgagttctatttcatcgaaatgaacacccgtattcaggtagaacacccggttacagaaatgatcaccggcgttgacctgatcaaagaacagctgcgtatcgctgccggtcaaccgctgtcgatcaagcaagaagaagttcacgttcgcggccatgcggtggaatgtcgtatcaacgccgaagatccgaacaccttcctgccaagtccgggcaaaatcacccgtttccacgcacctggcggttttggcgtacgttgggagtctcatatctacgcgggctacaccgtaccgccgtactatgactcaatgatcggtaagctgatttgctacggtgaaaaccgtgacgtggcgattgcccgcatgaagaatgcgctgcaggagctgatcatcgacggtatcaaaaccaacgttgatctgcagatccgcatcatgaatgacgagaacttccagcatggtggcactaacatccactatctggagaaaaaactcggtcttcaggaaaaataatataggaggatataacatgagctggattgaacgaattaaaagcaacattactcccacccgcaaggcgagcattcctgaaggggtgtggactaagtgtgatagctgcggtcaggttttataccgcgctgagctggaacgtaatcttgaggtctgtccgaagtgtgaccatcacatgcgtatgacagcgcgtaatcgcctgcatagcctgttagatgaaggaagccttgtggagctgggtagcgagcttgagccgaaagatgtgctgaagtttcgtgactccaagaagtataaagaccgtctggcatctgcgcagaaagaaaccggcgaaaaagatgcgctggtggtgatgaaaggcactctgtatggaatgccggttgtcgctgcggcattcgagttcgcctttatgggcggttcaatggggtctgttgtgggtgcacgtttcgtgcgtgccgttgagcaggcgctggaagataactgcccgctgatctgcttctccgcctctggtggcgcacgtatgcaggaagcactgatgtcgctgatgcagatggcgaaaacctctgcggcactggcaaaaatgcaggagcgcggcttgccgtacatctccgtgctgaccgacccgacgatgggcggtgtttctgcaagtttcgccatgctgggcgatctcaacatcgctgaaccgaaagcgttaatcggctttgccggtccgcgtgttatcgaacagaccgttcgcgaaaaactgccgcctggattccagcgcagtgaattcctgatcgagaaaggcgcgatcgacatgatcgtccgtcgtccggaaatgcgcctgaaactggcgagtattctggcgaagttgatgaatctgccagcgccgaatcctgaagcgccgcgtgaaggcgtagtggtacccccggtaccggatcaggaacctgaggcctgagactaggaggatcttaaatgaccgacgtccgattccgcattatcggtacgggtgcctacgtaccggaacggatcgtctccaacgatgaagtcggcgcgccggccggggtggacgacgactggatcacccgcaagaccggtatccggcagcgtcgctgggccgccgacgaccaggccacctcggacctggccacggccgcggggcgggcagcgctgaaagcggcgggcatcacgcccgagcagctgaccgtgatcgcggtcgccacctccacgccggaccggccgcagccgcccacggcggcctatgtccagcaccacctcggtgcgaccggcactgcggcgttcgacgtcaacgcggtctgctccggcaccgtgttcgcgctgtcctcggtggcgggcaccctcgtgtaccggggcggttacgcgctggtcatcggcgcggacctgtactcgcgcatcctcaacccggccgaccgcaagacggtcgtgctgttcggggacggcgccggcgcaatggtcctcgggccgacctcgaccggcacgggccccatcgtccggcgcgtcgccctgcacaccttcggcggcctcaccgacctgatccgtgtgcccgcgggcggcagccgccagccgctggacacggatggcctcgacgcgggactgcagtacttcgcgatggacgggcgtgaggtgcgccgcttcgtcacggagcacctgccgcagctgatcaagggcttcctgcacgaggccggggtcgacgccgccgacatcagccacttcgtgccgcatcaggccaacggtgtcatgctcgacgaggtcttcggcgagctgcatctgccgcgggcgaccatgcaccggacggtcgagacctacggcaacacgggagcggcctccatcccgatcaccatggacgcggccgtgcgcgccggttccttccggccgggcgagctggtcctgctggccgggttcggcggcggcatggccgcgagcttcgccctgatcgagtggtagtactatcataaaaataagaagcctgcatttgcaggcttcttatttttat

SEQ ID NO: 46 - DNA, 30456 bp, artificial sequence
  plasmid SG714
aaggccagcaaaaggccaggaaccgtaaaaaggccgcgttgctggcgtttttccataggctccgcccccctgacgagcatcacaaaaatcgacgctcaagtcagaggtggcgaaacccgacaggactataaagataccaggcgtttccccctggaagctccctcgtgcgctctcctgttccgaccctgccgcttaccggatacctgtccgcctttctcccttcgggaagcgtggcgctttctcatagctcacgctgtaggtatctcagttcggtgtaggtcgttcgctccaagctgggctgtgtgcacgaaccccccgttcagcccgaccgctgcgccttatccggtaactatcgtcttgagtccaacccggtaagacacgacttatcgccactggcagcagccactggtaacaggattagcagagcgaggtatgtaggcggtgctacagagttcttgaagtggtggcctaactacggctacactagaagaacagtatttggtatctgcgctctgctgaagccagttaccttcggaaaaagagttggtagctcttgatccggcaaacaaaccaccgctggtagcggtggtttttttgtttgcaagcagcagattacgcgcagaaaaaaaggatctcaagaagatcctttgatcttttctacggggtctgacgctcagtggaacgaaaactcacgttaagggattttggtcatgagattatcaaaaaggatcttcacctagatccttttaaattaaaaatgaagttttaaatcaatctaaagtatatatgagtaaacttggtctgacagctcttcctttttcaatattattgaagcatttatcagggttattgtctcatgagcggatacatatttgaatgtatttagaaaaataaacaaataggggttccgcgcacatttccccgaaaagtgccacctgacggtcctaaatttatattttttactttataatatataattgattatagaatccaaattagataggaggaccaggtaaatggagaataattttattgtcaacgaaaacgagaaaagggttttaaagcagatatttaacaactccaatatcagtagaactcaaatttccaagaatttagaactgaataaagcaacaatttcgaacattcttaacaatctaaagcataaaagtttggtaaatgaagttggtgaaggaaattctactaaaagtggtggaagaaaacctatacttctcgaaattaatcaaaagtatgggtattatataagcatggatttgacatatgattctgttgagttaatgtataactattttgatgctacaattctcaaacaagatagttatgaactgaatgataagaatgtaagtagcatattacagatactcaaatctaacataaatgttagcgaaaaatacgacacattatacggtttattagggataagtatatccatacatgggattgtagatgatgaacaaaacatcattaatctaccatttcacaagaatgaaaaaagaacgtttactgatgaacttaagtctttcactaatgtaccagtggttattgaaaatgaggcaaatttaagtgcattatacgagaaaagtttatacatcaattcgaatattaacaacttgatcacattgtctatacataaaggtataggagctggcatcataatcaataagaaactctatagaggtagtaatggagaagctggagaaataggaaagactcttgttttagagtctatcaataacaatgataacaagtactataaaatagaggatatttgtagtcaagacgctttgatacaaaagattaataacagattaggagttacacttacatttaccgaactaatacagtattataacgaaggaaatagtattgtagctcatgaaatcaaacagtttatcaacaaaatgactgtcttaatacacaatcttaatactcagtttaatccagatgcaatatacatcaattgtcccttgattaatgaacttcctaatattctaaacgaaatcaaagaacaattctcttgtttttcacaaggaagtcctatacaattgcatttaaccactaatgttaaacaagctacattattaggtggaacattagcaattatgcagaaaacccttaacataaacaatatccaaatgaatattaaatagttacagcagtctgagttataaaatagatatctcggaccgtctattcttccttatttgagtgggtaccaatgaaatctttcgagctaaatcgatttctggcccactcttttttattttttagtaagcgtttacaaaaaatgaacaatgtgctatattacctctaaagttagtttgtttattaaattaaccaactaaaatgtcgggatccttactgcaataggttgctactgttttatcatgaatcatcaacgaatgtattttgcatatttcagtatctttaataaactctttgcaatttttacaagttttcatatacgcccttcttttcataaattaatttatgaattctatgtattccaaggagcttttggatccaattaggaggaatctgcgatggaaaagaaggaatttagagttttaataaagtattgttttcttaaaggaaagaatacagtagaagctaagacttggttagataatgaatttccagattctgctcctggtaaaagtacaattatagattggtatgcaaaatttaaaagaggagaaatgtcaacagaagatggagaaagatctggtagaccaaaagaagttgtaactgatgaaaatataaagaagatacataaaatgatattaaatgatagaaagatgaagttaatagaaatagcagaagctttaaaaatatctaaagaaagagttggacatataatacatcaatatttagatatgagaaaattatgtgcaaaatgggttccaagagaattaacttttgatcaaaagcaaagaagagtagatgatagtaagagatgtttacaattattaacaagaaatactccagaatttttcagaagatatgtaacaatggatgaaacttggttacatcattatacacctgaaagtaatagacaatcagcagaatggacagctactggagaaccatcacctaaaagaggaaagactcaaaagagtgctggaaaggttatggcatcagtattttgggatgctcatggtataatatttatagattatttagaaaaaggaaaaacaataaattctgattattatatggcattattagaaagattaaaagttgaaatagcagctaaaagaccacatatgaagaagaaaaaagtattatttcatcaagataatgctccttgtcataagtcattaagaactatggcaaagatacatgaattaggttttgaattattaccacatccaccttattcaccagatttagctccttctgatttctttttatttagtgatttaaagagaatgttagcaggaaagaagtttggttgtaatgaagaagttatagcagaaacagaagcttattttgaagcaaaacctaaggaatattatcaaaatggaataaagaagttagaaggtagatataatagatgtatagcattagaaggaaattatgtagaataagaattccttaattaaggagctcgataaaaataagaagcctgcatttgcaggcttcttatttttatggtgcatcagctcttatatattaagctaccaacttagtatataagccaaaacttaaatgtgctaccaacacatcaagccgttagagaactctatctatagcaatatttcaaatgtaccgacatacaagagaaacattaactatatatattcaatttatgagattatcttaacagatataaatgtaaattgcaataagtaagatttagaagtttatagcctttgtgtattggaagcagtacgcaaaggcttttttatttgataaaaattagaagtatatttattttttcataattaatttatgaaaatgaaagggggtgagcaaagtgacagaggaaagcagtatcttatcaaataacaaggtattagcaatatcattattgactttagcagtaaacattatgacttttatagtgcttgtagctaagtagtacgaaagggggagctttaaaaagctccttggaatacatagaattcataaattaatttatgaaaagaagggcgtatatgaaaacttgtaaaaattgcaaagagtttattaaagatactgaaatatgcaaaatacattcgttgatgattcatgataaaacagtagcaacctattgcagtaaatacaatgagtcaagatgtttacataaagggaaagtccaatgtattaattgttcaaagatgaaccgatatggatggtgtgccataaaaatgagatgttttacagaggaagaacagaaaaaagaacgtacatgcattaaatattatgcaaggagctttaaaaaagctcatgtaaagaagagtaaaaagaaaaaataatttatttattaatttaatattgagagtgccgacacagtatgcactaaaaaatatatctgtggtgtagtgagccgatacaaaaggatagtcactcgcattttcataatacatcttatgttatgattatgtgtcggtgggacttcacgacgaaaacccacaataaaaaaagagttcggggtagggttaagcatagttgaggcaactaaacaatcaagctaggatatgcagtagcagaccgtaaggtcgttgtttaggtgtgttgtaatacatacgctattaagatgtaaaaatacggataccaatgaagggaaaagtataatttttggatgtagtttgtttgttcatctatgggcaaactacgtccaaagccgtttccaaatctgctaaaaagtatatcctttctaaaatcaaagtcaagtatgaaatcataaataaagtttaattttgaagttattatgatattatgtttttctattaaaataaattaagtatatagaatagtttaataatagtatatacttaatgtgataagtgtctgacagtgtcacagaaaggatgattgttatggattataagcggccggccagtgggcaagttgaaaaattcacaaaaatgtggtataatatctttgttcattagagcgataaacttgaatttgagagggaacttagatggtatttgaaaaaattgataaaaatagttggaacagaaaagagtattttgaccactactttgcaagtgtaccttgtacctacagcatgaccgttaaagtggatatcacacaaataaaggaaaagggaatgaaactatatcctgcaatgctttattatattgcaatgattgtaaaccgccattcagagtttaggacggcaatcaatcaagatggtgaattggggatatatgatgagatgataccaagctatacaatatttcacaatgatactgaaacattttccagcctttggactgagtgtaagtctgactttaaatcatttttagcagattatgaaagtgatacgcaacggtatggaaacaatcatagaatggaaggaaagccaaatgctccggaaaacatttttaatgtatctatgataccgtggtcaaccttcgatggctttaatctgaatttgcagaaaggatatgattatttgattcctatttttactatggggaaatattataaagaagataacaaaattatacttcctttggcaattcaagttcatcacgcagtatgtgacggatttcacatttgccgttttgtaaacgaattgcaggaattgataaatagttaacttcaggtttgtctgtaactaaaaacaagtatttaagcaaaaacatcgtagaaatacggtgttttttgttaccctaagtttactctatcattgatagagtgcgactctatcattgatagagtccacaggttggctgataagtccccggtctgtaccgttcgtataatgtatgctatacgaagttataggaggttataatgaacgagaaaaatataaaacacagtcaaaactttattacttcaaaacataatatagataaaataatgacaaatataagattaaatgaacatgataatatctttgaaatcggctcaggaaaagggcattttacccttgaattagtacagaggtgtaatttcgtaactgccattgaaatagaccataaattatgcaaaactacagaaaataaacttgttgatcacgataatttccaagttttaaacaaggatatattgcagtttaaatttcctaaaaaccaatcctataaaatatttggtaatataccttataacataagtacggatataatacgcaaaattgtttttgatagtatagctgatgagatttatttaatcgtggaatacgggtttgctaaaagattattaaatacaaaacgctcattggcattatttttaatggcagaagttgatatttctatattaagtatggttccaagagaatattttcatcctaaacctaaagtgaatagctcacttatcagattaaatagaaaaaaatcaagaatatcacacaaagataaacagaagtataattatttcgttatgaaatgggttaacaaagaatacaagaaaatatttacaaaaaatcaatttaacaattccttaaaacatgcaggaattgacgatttaaacaatattagctttgaacaattcttatctcttttcaatagctataaattatttaataagtaagttaagggatgcataaactgcatcccttaacttgtttttcgtgtacctattttttgtgaatcgattatgtcttttgcgcattcgtcgacaattgcatatattgataaaaataataatagtgggtataattaagttgttaggaggttagttagaatgagtagactcgataagtctaaagtgataaattccgcattagaactccttaatgaagttggaattgaaggtctaactaccaggaaattagctcagaaacttggagttgaacaaccaacattgtactggcatgtcaaaaacaaaagagcactcttagatgcattagcaatcgaaatgttagacagacatcatacacacttttgtccattagaaggtgaaagttggcaagactttttgaggaataacgcgaaaagtttcagatgtgctttactatcccatagagatggggctaaagttcacttaggaactagacctacagaaaagcagtatgagacacttgaaaatcagttggcatttctatgtcaacaaggattctcattagagaacgcattatatgctctttcagctgtaggtcatttcacgttaggttgtgttttggaagatcaagaacatcaagttgcaaaagaagagagagaaactcctactacagatagtatgccacctttattacgacaagctatagaactgtttgatcatcaaggagctgaacctgcgtttctctttggattggagttaataatttgcggactagagaaacagcttaagtgtgaaagtggatcttagttagcaccggtcagggtggtgaatgtgaaaccagtaacgttatacgatgtcgcagagtatgccggtgtctcttatcagaccgtttcccgcgtggtgaaccaggccagccacgtttctgcgaaaacgcgggaaaaagtggaagcggcgatggcggagctgaattacattcccaaccgcgtggcacaacaactggcgggcaaacagtcgttgctgattggcgttgccacctccagtctggccctgcacgcgccgtcgcaaattgtcgcggcgattaaatctcgcgccgatcaactgggtgccagcgtggtggtgtcgatggtagaacgaagcggcgtcgaagcctgtaaagcggcggtgcacaatcttctcgcgcaacgcgtcagtgggctgatcattaactatccgctggatgaccaggatgccattgctgtggaagctgcctgcactaatgttccggcgttatttcttgatgtctctgaccagacacccatcaacagtattattttctcccatgaagacggtacgcgactgggcgtggagcatctggtcgcattgggtcaccagcaaatcgcgctgttagcgggcccattaagttctgtctcggcgcgtctgcgtctggctggctggcataaatatctcactcgcaatcaaattcagccgatagcggaacgggaaggcgactggagtgccatgtccggttttcaacaaaccatgcaaatgctgaatgagggcatcgttcccactgcgatgctggttgccaacgatcagatggcgctgggcgcaatgcgcgccattaccgagtccgggctgcgcgttggtgcggacatctcggtagtgggatacgacgataccgaagacagctcatgttatatcccgccgttaaccaccatcaaacaggattttcgcctgctggggcaaaccagcgtggaccgcttgctgcaactctctcagggccaggcggtgaagggcaatcagctgttgcccgtctcactggtgaaaagaaaaaccaccctggcgcccaatacgcaaaccgcctctccccgcgcgttggccgattcattaatgcagctggcacgacaggtttcccgactggaaagcgggcagtgagcgcaacgcaattaatgtaagttagctcactcattaggcaccgggatctcgaccgatgcccttgagagccttcaacccagtcagctccttccggtgggcgcggggcatgactagcatgatcgtgctcctgtcgttgaggacccggctaggctggcggggttgccttactggttagcagaatgaatcaccgatacgcgataacttcgtataatgtatgctatacgaacggtagctcagctagcacccggaattgtgagcggataacaattccttggaattgtgagcggataacaattataattaagttgttaggagggaacttagatgaaaaattgtgtcatcgtcagtgcggtacgtactgctatcggtagttttaacggttcactcgcttccaccagcgccatcgacctgggggcgacagtaattaaagccgccattgaacgtgcaaaaatcgattcacaacacgttgatgaagtgattatgggtaacgtgttacaagccgggctggggcaaaatccggcgcgtcaggcactgttaaaaagcgggctggcagaaacggtgtgcggattcacggtcaataaagtatgtggttcgggtcttaaaagtgtggcgcttgccgcccaggccattcaggcaggtcaggcgcagagcattgtggcggggggtatggaaaatatgagtttagccccctacttactcgatgcaaaagcacgctctggttatcgtcttggagacggacaggtttatgacgtaatcctgcgcgatggcctgatgtgcgccacccatggttatcatatggggattaccgccgaaaacgtggctaaagagtacggaattacccgtgaaatgcaggatgaactggcgctacattcacagcgtaaagcggcagccgcaattgagtccggtgcttttacagccgaaatcgtcccggtaaatgttgtcactcgaaagaaaaccttcgtcttcagtcaagacgaattcccgaaagcgaattcaacggctgaagcgttaggtgcattgcgcccggccttcgataaagcaggaacagtcaccgctgggaacgcgtctggtattaacgacggtgctgccgctctggtgattatggaagaatctgcggcgctggcagcaggccttacccccctggctcgcattaaaagttatgccagcggtggcgtgccccccgcattgatgggtatggggccagtacctgccacgcaaaaagcgttacaactggcggggctgcaactggcggatattgatctcattgaggctaatgaagcatttgctgcacagttccttgccgttgggaaaaacctgggctttgattctgagaaagtgaatgtcaacggcggggccatcgcgctcgggcatcctatcggtgccagtggtgctcgtattctggtcacactattacatgccatgcaggcacgcgataaaacgctggggctggcaacactgtgcattggcggcggtcagggaattgcgatggtgattgaacggttgaattaatagggaggtctgtttaatgaaaaaggtatgtgttataggtgcaggtactatgggttcaggaattgctcaggcatttgcagctaaaggatttgaagtagtattaagagatattaaagatgaatttgttgatagaggattagattttatcaataaaaatctttctaaattagttaaaaaaggaaagatagaagaagctactaaagttgaaatcttaactagaatttccggaacagttgaccttaatatggcagctgattgcgatttagttatagaagcagctgttgaaagaatggatattaaaaagcagatttttgctgacttagacaatatatgcaagccagaaacaattcttgcatcaaatacatcatcactttcaataacagaagtggcatcagcaactaaaagacctgataaggttataggtatgcatttctttaatccagctcctgttatgaagcttgtagaggtaataagaggaatagctacatcacaagaaacttttgatgcagttaaagagacatctatagcaataggaaaagatcctgtagaagtagcagaagcaccaggatttgttgtaaatagaatattaataccaatgattaatgaagcagttggtatattagcagaaggaatagcttcagtagaagacatagataaagctatgaaacttggagctaatcacccaatgggaccattagaattaggtgattttataggtcttgatatatgtcttgctataatggatgttttatactcagaaactggagattctaagtatagaccacatacattacttaagaagtatgtaagagcaggatggcttggaagaaaatcaggaaaaggtttctacgattattcaaaataagtttacaagaatccctttaggaggattagtcatggaactaaacaatgtcatccttgaaaaggaaggtaaagttgctgtagttaccattaacagacctaaagcattaaatgcgttaaatagtgatacactaaaagaaatggattatgttataggtgaaattgaaaatgatagcgaagtacttgcagtaattttaactggagcaggagaaaaatcatttgtagcaggagcagatatttctgagatgaaggaaatgaataccattgaaggtagaaaattcgggatacttggaaataaagtgtttagaagattagaacttcttgaaaagcctgtaatagcagctgttaatggttttgctttaggaggcggatgcgaaatagctatgtcttgtgatataagaatagcttcaagcaacgcaagatttggtcaaccagaagtaggtctcggaataacacctggttttggtggtacacaaagactttcaagattagttggaatgggcatggcaaagcagcttatatttactgcacaaaatataaaggcagatgaagcattaagaatcggacttgtaaataaggtagtagaacctagtgaattaatgaatacagcaaaagaaattgcaaacaaaattgtgagcaatgctccagtagctgttaagttaagcaaacaggctattaatagaggaatgcagtgtgatattgatactgctttagcatttgaatcagaagcatttggagaatgcttttcaacagaggatcaaaaggatgcaatgacagctttcatagagaaaagaaaaattgaaggcttcaaaaatagataggaggtaagtttataggaggaattccatatgatatggaaacggaaaatcaccctggaagcactgaatgctatgggtgaaggaaacatggtggggttcctggatattcgctttgaacatattggtgatgacacccttgaagcgacaatgccagtagactcgcggacaaagcagcctttcgggttgctgcatggaggagcatccgtggtactggccgaaagtatcggttccgttgccggttatttatgtaccgaaggtgagcaaaaagtggttggtctggaaatcaatgctaaccacgtccgctcggcacgagaagggcgggtgcgcggcgtatgcaaaccgttgcatctcggttcgcgtcaccaggtctggcagattgaaatcttcgatgagaaagggcgtttgtgctgttcgtcacgattgacgaccgccattttgtgaatttacacgatcgacgtgctcagctagcacccggaattgtgagcggataacaattccttggaattgtgagcggataacaattataattaagttgttaggaggttagaatgagtctgaatttccttgattttgaacagccgattgcagagctggaagcgaaaatcgattctctgactgcggttagccgtcaggatgagaaactggatattaacatcgatgaagaagtgcatcgtctgcgtgaaaaaagcgtagaactgacacgtaaaatcttcgccgatctcggtgcatggcagattgcgcaactggcacgccatccacagcgtccttataccctggattacgttcgcctggcatttgatgaatttgacgaactggctggcgaccgcgcgtatgcagacgataaagctatcgtcggtggtatcgcccgtctcgatggtcgtccggtgatgatcattggtcatcaaaaaggtcgtgaaaccaaagaaaaaattcgccgtaactttggtatgccagcgccagaaggttaccgcaaagcactgcgtctgatgcaaatggctgaacgctttaagatgccaatcatcacctttatcgacaccccgggggcttatccgggcgtgggcgcagaagagcgcggtcagtctgaagccattgcacgcaacctgcgtgaaatgtctcgccttagcgtaccgactatttgtaccgttatcggtgaaggtggttctggcggcgcgctggcgattggcgtgggcgataaagtgaatatgctgcaatacagcacctattccgttatctcgccggaaggttgtgcgtccattctgtggaagagcgctgataaagcgccgctggcggctgaagcgatgggtatcatcgctccgcgtctgaaagaactaaaactgatcgactccatcatcccagaaccgctgggtggtgctcaccgtaacccggaagcgatggcggcatcgttgaaagcgcaactgttggcggatctggccgatctcgacgtgttaagcactgaagatttaaaaaatcgtcgttatcagcgcctgatgagctacggttacgcgtaataaggaggaacccactcatggatattcgtaagattaaaaaactgatcgagctggttgaagaatcaggcatctccgaactggaaatttctgaaggcgaagagtcagtacgcattagccgtgcagctcctgccgcaagtttccctgtgatgcaacaagcttacgctgcaccaatgatgcagcagccagctcaatctaacgcagccgctccggcgaccgttccttccatggaagcgccagcagcagcggaaatcagtggtcacatcgtacgttccccgatggttggtactttctaccgcaccccaagcccggacgcaaaagcgttcatcgaagtgggtcagaaagtcaacgtgggcgataccctgtgcatcgttgaagccatgaaaatgatgaaccagatcgaagcggacaaatccggtaccgtgaaagcaattctggtcgaaagtggacaaccggtagaatttgacgagccgctggtcgtcatcgagtaacgaggcgaacatgctggataaaattgttattgccaaccgcggcgagattgcattgcgtattcttcgtgcctgtaaagaactgggcatcaagactgtcgctgtgcactccagcgcggatcgcgatctaaaacacgtattactggcagatgaaacggtctgtattggccctgctccgtcagtaaaaagttatctgaacatcccggcaatcatcagcgccgctgaaatcaccggcgcagtagcaatccatccgggttacggcttcctctccgagaacgccaactttgccgagcaggttgaacgctccggctttatcttcattggcccgaaagcagaaaccattcgcctgatgggcgacaaagtatccgcaatcgcggcgatgaaaaaagcgggcgtcccttgcgtaccgggttctgacggcccgctgggcgacgatatggataaaaaccgtgccattgctaaacgcattggttatccggtgattatcaaagcctccggcggcggcggcggtcgcggtatgcgcgtagtgcgcggcgacgctgaactggcacaatccatctccatgacccgtgcggaagcgaaagctgctttcagcaacgatatggtttacatggagaaatacctggaaaatcctcgccacgtcgagattcaggtactggctgacggtcagggcaacgctatctatctggcggaacgtgactgctccatgcaacgccgccaccagaaagtggtcgaagaagcgccagcaccgggcattaccccggaactgcgtcgctacatcggcgaacgttgcgctaaagcgtgtgttgatatcggctatcgcggtgcaggtactttcgagttcctgttcgaaaacggcgagttctatttcatcgaaatgaacacccgtattcaggtagaacacccggttacagaaatgatcaccggcgttgacctgatcaaagaacagctgcgtatcgctgccggtcaaccgctgtcgatcaagcaagaagaagttcacgttcgcggccatgcggtggaatgtcgtatcaacgccgaagatccgaacaccttcctgccaagtccgggcaaaatcacccgtttccacgcacctggcggttttggcgtacgttgggagtctcatatctacgcgggctacaccgtaccgccgtactatgactcaatgatcggtaagctgatttgctacggtgaaaaccgtgacgtggcgattgcccgcatgaagaatgcgctgcaggagctgatcatcgacggtatcaaaaccaacgttgatctgcagatccgcatcatgaatgacgagaacttccagcatggtggcactaacatccactatctggagaaaaaactcggtcttcaggaaaaataatataggaggatataacatgagctggattgaacgaattaaaagcaacattactcccacccgcaaggcgagcattcctgaaggggtgtggactaagtgtgatagctgcggtcaggttttataccgcgctgagctggaacgtaatcttgaggtctgtccgaagtgtgaccatcacatgcgtatgacagcgcgtaatcgcctgcatagcctgttagatgaaggaagccttgtggagctgggtagcgagcttgagccgaaagatgtgctgaagtttcgtgactccaagaagtataaagaccgtctggcatctgcgcagaaagaaaccggcgaaaaagatgcgctggtggtgatgaaaggcactctgtatggaatgccggttgtcgctgcggcattcgagttcgcctttatgggcggttcaatggggtctgttgtgggtgcacgtttcgtgcgtgccgttgagcaggcgctggaagataactgcccgctgatctgcttctccgcctctggtggcgcacgtatgcaggaagcactgatgtcgctgatgcagatggcgaaaacctctgcggcactggcaaaaatgcaggagcgcggcttgccgtacatctccgtgctgaccgacccgacgatgggcggtgtttctgcaagtttcgccatgctgggcgatctcaacatcgctgaaccgaaagcgttaatcggctttgccggtccgcgtgttatcgaacagaccgttcgcgaaaaactgccgcctggattccagcgcagtgaattcctgatcgagaaaggcgcgatcgacatgatcgtccgtcgtccggaaatgcgcctgaaactggcgagtattctggcgaagttgatgaatctgccagcgccgaatcctgaagcgccgcgtgaaggcgtagtggtacccccggtaccggatcaggaacctgaggcctgagactaggaggatcttaaatgaccgacgtccgattccgcattatcggtacgggtgcctacgtaccggaacggatcgtctccaacgatgaagtcggcgcgccggccggggtggacgacgactggatcacccgcaagaccggtatccggcagcgtcgctgggccgccgacgaccaggccacctcggacctggccacggccgcggggcgggcagcgctgaaagcggcgggcatcacgcccgagcagctgaccgtgatcgcggtcgccacctccacgccggaccggccgcagccgcccacggcggcctatgtccagcaccacctcggtgcgaccggcactgcggcgttcgacgtcaacgcggtctgctccggcaccgtgttcgcgctgtcctcggtggcgggcaccctcgtgtaccggggcggttacgcgctggtcatcggcgcggacctgtactcgcgcatcctcaacccggccgaccgcaagacggtcgtgctgttcggggacggcgccggcgcaatggtcctcgggccgacctcgaccggcacgggccccatcgtccggcgcgtcgccctgcacaccttcggcggcctcaccgacctgatccgtgtgcccgcgggcggcagccgccagccgctggacacggatggcctcgacgcgggactgcagtacttcgcgatggacgggcgtgaggtgcgccgcttcgtcacggagcacctgccgcagctgatcaagggcttcctgcacgaggccggggtcgacgccgccgacatcagccacttcgtgccgcatcaggccaacggtgtcatgctcgacgaggtcttcggcgagctgcatctgccgcgggcgaccatgcaccggacggtcgagacctacggcaacacgggagcggcctccatcccgatcaccatggacgcggccgtgcgcgccggttccttccggccgggcgagctggtcctgctggccgggttcggcggcggcatggccgcgagcttcgccctgatcgagtggtaggctcagctagcacccggaattgtgagcggataacaattccttggaattgtgagcggataacaattataattaagttgttaggaggttagaatgactcagcgcattgcgtatgtgaccggcggcatgggtggtatcggaaccgccatttgccagcggctggccaaggatggctttcgtgtggtggccggttgcggccccaactcgccgcgccgcgaaaagtggctggagcagcagaaggccctgggcttcgatttcattgcctcggaaggcaatgtggctgactgggactcgaccaagaccgcattcgacaaggtcaagtccgaggtcggcgaggttgatgtgctgatcaacaacgccggtatcacccgcgacgtggtgttccgcaagatgacccgcgccgactgggatgcggtgatcgacaccaacctgacctcgctgttcaacgtcaccaagcaggtgatcgacggcatggccgaccgtggctggggccgcatcgtcaacatctcgtcggtgaacgggcagaagggccagttcggccagaccaactactccaccgccaaggccggcctgcatggcttcaccatggcactggcgcaggaagtggcgaccaagggcgtgaccgtcaacacggtctctccgggctatatcgccaccgacatggtcaaggcgatccgccaggacgtgctcgacaagatcgtcgcgacgatcccggtcaagcgcctgggcctgccggaagagatcgcctcgatctgcgcctggttgtcgtcggaggagtccggtttctcgaccggcgccgacttctcgctcaacggcggcctgcatatgggctgaacaggaggcaataaatgagcgcacaatccctggaagtaggccagaaggcccgtctcagcaagcggttcggggcggcggaggtagccgccttcgccgcgctctcggaggacttcaaccccctgcacctggacccggccttcgccgccaccacggcgttcgagcggcccatagtccacggcatgctgctcgccagcctcttctccgggctgctgggccagcagttgccgggcaaggggagcatctatctgggtcaaagcctcagcttcaagctgccggtctttgtcggggacgaggtgacggccgaggtggaggtgaccgcccttcgcgaggacaagcccatcgccaccctgaccacccgcatcttcacccaaggcggcgccctcgccgtgacgggggaagccgtggtcaagctgccttaagttgaggaggtagataatgtctacaacacataacgtccctcagggcgatcttgttttacgtactttagccatgcccgccgataccaatgccaatggtgacatctttggtggttggttaatgtcacaaatggatattggcggcgctattctggcaaaagaaattgcccacggtcgcgtagtgactgtgcgggttgaaggaatgactttcttacggccggttgcggtcggcgatgtggtgtgctgctatgcacgctgtgtccagaaagggacgacatcggtcagcattaatattgaagtgtgggtgaaaaaagtagcgtctgaaccaatcgggcaacggtataaagcgacagaagcattatttaagtatgtcgcggttgatcctgaaggaaaacctcgcgccttacctgttgagtaaagcgactgacgtaggaggatatcaatgaaagttacaaatcaaaaagaactaaaacaaaagctaaatgaattgagagaagcgcaaaagaagtttgcaacctatactcaagagcaagttgataaaatttttaaacaatgtgccatagccgcagctaaagaaagaataaacttagctaaattagcagtagaagaaacaggaataggtcttgtagaagataaaattataaaaaatcattttgcagcagaatatatatacaataaatataaaaatgaaaaaacttgtggcataatagaccatgacgattctttaggcataacaaaggttgctgaaccaattggaattgttgcagccatagttcctactactaatccaacttccacagcaattttcaaatcattaatttctttaaaaacaagaaacgcaatattcttttcaccacatccacgtgcaaaaaaatctacaattgctgcagcaaaattaattttagatgcagctgttaaagcaggagcacctaaaaatataataggctggatagatgagccatcaatagaactttctcaagatttgatgagtgaagctgatataatattagcaacaggaggtccttcaatggttaaagcggcctattcatctggaaaacctgcaattggtgttggagcaggaaatacaccagcaataatagatgagagtgcagatatagatatggcagtaagctccataattttatcaaagacttatgacaatggagtaatatgcgcttctgaacaatcaatattagttatgaattcaatatacgaaaaagttaaagaggaatttgtaaaacgaggatcatatatactcaatcaaaatgaaatagctaaaataaaagaaactatgtttaaaaatggagctattaatgctgacatagttggaaaatctgcttatataattgctaaaatggcaggaattgaagttcctcaaactacaaagatacttataggcgaagtacaatctgttgaaaaaagcgagctgttctcacatgaaaaactatcaccagtacttgcaatgtataaagttaaggattttgatgaagctctaaaaaaggcacaaaggctaatagaattaggtggaagtggacacacgtcatctttatatatagattcacaaaacaataaggataaagttaaagaatttggattagcaatgaaaacttcaaggacatttattaacatgccttcttcacagggagcaagcggagatttatacaattttgcgatagcaccatcatttactcttggatgcggcacttggggaggaaactctgtatcgcaaaatgtagagcctaaacatttattaaatattaaaagtgttgctgaaagaagggaaaatatgctttggtttaaagtgccacaaaaaatatattttaaatatggatgtcttagatttgcattaaaagaattaaaagatatgaataagaaaagagcctttatagtaacagataaagatctttttaaacttggatatgttaataaaataacaaaggtactagatgagatagatattaaatacagtatatttacagatattaaatctgatccaactattgattcagtaaaaaaaggtgctaaagaaatgcttaactttgaacctgatactataatctctattggtggtggatcgccaatggatgcagcaaaggttatgcacttgttatatgaatatccagaagcagaaattgaaaatctagctataaactttatggatataagaaagagaatatgcaatttccctaaattaggtacaaaggcgatttcagtagctattcctacaactgctggtaccggttcagaggcaacaccttttgcagttataactaatgatgaaacaggaatgaaataccctttaacttcttatgaattgaccccaaacatggcaataatagatactgaattaatgttaaatatgcctagaaaattaacagcagcaactggaatagatgcattagttcatgctatagaagcatatgtttcggttatggctacggattatactgatgaattagccttaagagcaataaaaatgatatttaaatatttgcctagagcctataaaaatgggactaacgacattgaagcaagagaaaaaatggcacatgcctctaatattgcggggatggcatttgcaaatgctttcttaggtgtatgccattcaatggctcataaacttggggcaatgcatcacgttccacatggaattgcttgtgctgtattaatagaagaagttattaaatataacgctacagactgtccaacaaagcaaacagcattccctcaatataaatctcctaatgctaagagaaaatatgctgaaattgcagagtatttgaatttaaagggtactagcgataccgaaaaggtaacagccttaatagaagctatttcaaagttaaagatagatttgagtattccacaaaatataagtgccgctggaataaataaaaaagatttttataatacgctagataaaatgtcagagcttgcttttgatgaccaatgtacaacagctaatcctaggtatccacttataagtgaacttaaggatatctatataaaatcattttaaatgctaaaggaggagacaatgagcaatatggaatcgacccgcatgctgcggcagccgatacagttgttgcaggggcacaagggaccggtcacggcctcgcgccaccgccgcaatgccgtggtgtatgcactgctgtgcctgctggcgctgctaccggtggccaccggccagtcggcggcgtggcaggccgccgggctggggctgttcatgcccggcgccggtttcctggcgctgggtggcgcctgggcgttgctgttcccgctgacggtgttcgtcttctggctggcggtcattgcctggttctggtcgggcatggtggtggcgccgctgaccctctggctgggcaccgccgcgctggccggctggctggcgggcgaggcgatctggccgccggcggtgtatctggcgccggccgccgccgccgccaccttcctgttcttccagtatcgcggcgccaagcggcgggccaaggaccgcgagcacttcaagttccgccaaagtttcttcgccgagtcgctggcggaggtgcaccagcgcgccgccaccgaaccggagccgggcgagcgcgaactgacgccggaccagttgcagggcgtgcgctacctgctcgagctggccttgcagccggtcggccagtacaagggctacaccatcatcgaccagttccagccggccgccctgcgctaccagctcaaccacatcggcttcgcgctgggcatggtgcaagggcattacacgcccaacttccagggctatctgggccaggcgcagcgcaacgtgatcgacacttaccgcgagcgcaaggtgtggggctactgggtgtacgagtcgatgtgggggcatttcaacttctccgacttcgatcccgcccgcaaggacaacatcatgctcaccggctggtacggcatgcatgtgggccagtacatgctcaatgccggcgacacccgctacagccagcccggcagcctgagcttccgcctcaacgacaagacctgctaccaccacgacatccattccatcaaccagtcggtgcgcgagaacttccagagttcggacttctgcctgtatccgtgcgagccgaactgggtgtacccggtctgcaacatgtacggcatgtcctcgctggcggtgtatgacacgctgttcgagcgccgcgacaccgcccaggtgctgcccaagtggctgcacatgctggacaccgagttcaccgaccagaaaggctcgctggtcggcttgcgctcatactggaccgggctggaaatgccgttctacaccggcgaggcgggcttcgccttcttcgccaacatcttctcgaccgatctggcgcgcaagctgtgggcggtggggcgcaaggaattgtcgatgtgcctgacgcaggacgccgagggccagacgcggctgactctgccgaaggaggcgctggccttcttcgacaccatcgacgccggcaactaccggccgggcaagctgttcgcctatgtggcggtgcagatgtgcgcgcgcgagttcggcgacgacgaactggccgaggcggcacgccgctcgatggaccaggattgcggcccggtggtcgagaacggcgtggcgcgctacaccaagggctcgacgctggccaacatctggggcgtggagggacggctgatgcgcaccggcgatttccgcaacagcttcgtcaaggggccgccgtcgtcggtgttcgacggtccgctgctgggtgatgcgcgctatccggaaatcctggtggcgaaggccttcagccgtggcgacgacctggaactggtgctgtacccgggggccggcgacgggccgcagacgctgggcttcgaacgcctcaagcccggcgtccgctatgtggtcgagggcgccgccagtggtgagttcaccgccgacgcggatggccgtgcgtcgctcgcggtcacgctcagcgggcgcactgcgctgcacatcaagccgggccactgaacgactcgaggaggactacggtgattaagagttttaatgaaattatcatgaaggtaaagagcaaagaaatgaaaaaagttgctgttgctgtagcacaagacgagccagtacttgaagcagtaagagatgctaagaaaaatggtattgcagatgctattcttgttggagaccatgacgaaatcgtgtcaatcgcgcttaaaataggaatggatgtaaatgattttgaaatagtaaacgagcctaacgttaagaaagctgctttaaaggcagtagagcttgtatcaactggaaaagctgatatggtaatgaagggacttgtaaatacagcaactttcttaagatctgtattaaacaaagaagttggacttagaacaggaaaaactatgtctcacgttgcagtatttgaaactgagaaatttgatagactattatttttaacagatgttgctttcaatacttatcctgaattaaaggaaaaaattgatatagtaaacaattcagttaaggttgcacatgcaataggaattgaaaatccaaaggttgctccaatttgtgcagttgaggttataaaccctaaaatgccatcaacacttgatgcagcaatgctttcaaaaatgagtgacagaggacaaattaaaggttgtgtagttgacggacctttagcacttgatatagctttatcagaagaagcagcacatcataagggagtaacaggagaagttgctggaaaagctgatatcttcttaatgccaaacatagaaacaggaaatgtaatgtataagactttaacatatacaactgattcaaaaaatggaggaatcttagttggaacttctgcaccagttgttttaacttcaagagctgacagccatgaaacaaaaatgaactctatagcacttgcagctttagttgcaggcaataaataaactggactaaggaggacgtaatgtatagattactaataatcaatcctggctcgacctcaactaaaattggtatttatgacgatgaaaaagagatatttgagaagactttaagacattcagctgaagagatagaaaaatataacactatatttgatcaatttcaattcagaaagaatgtaattttagatgcgttaaaagaagcaaacatagaagtaagttctttaaatgctgtagttggaagaggcggactcttaaagccaatagtaagtggaacttatgcagtaaatcaaaaaatgcttgaagaccttaaagtaggagttcaaggtcagcatgcgtcaaatcttggtggaattattgcaaatgaaatagcaaaagaaataaatgttccagcatacatagttgatccagttgttgtggatgagcttgatgaagtttcaagaatatcaggaatggctgacattccaagaaaaagtatattccatgcattaaatcaaaaagcagttgctagaagatatgcaaaagaagttggaaaaaaatacgaagatcttaatttaatcgtagtccacatgggtggaggtacttcagtaggtactcataaagatggtagagtaatagaagttaataatacacttgatggagaaggtccattctcaccagaaagaagtggtggagttccaataggagatcttgtaagattgtgcttcagcaacaaatatacttatgaagaagtaatgaaaaagataaacggcaaaggcggagttgttagttacttaaatactatcgattttaaggctgtagttgataaagctcttgaaggagataagaaatgtgcacttatatatgaagctttcacattccaggtagcaaaagagataggaaaatgttcaaccgttttaaaaggaaatgtagatgcaataatcttaacaggcggaattgcgtacaacgagcatgtatgtaatgccatagaggatagagtaaaattcatagcacctgtagttagatatggtggagaagatgaacttcttgcacttgcagaaggtggacttagagttttaagaggagaagaaaaagctaaggaatacaaataaactagcgaaggaggatcacatgtctattataaaaagctatgccgcaaaagaggcgggcagcgaactcgaactttacgaatatgatgccggtgaactcaggccggaagatgtcgaggtgcaggtcgactactgcggtatctgccattccgatctttccatgatcgacaacgaatggggattctctcagtatccgctggttgccgggcatgaagtgattggccgcgtggcggcgctcggcagtgcggcgcaggaaaaaggggtgaaagttggtcagcgcgtgggcgtaggctggacggcgcgcagctgtgggcattgcgatgcatgtatcagcggtaatcagattaactgcctggaaggcgccgtagccaccattctcaaccgtggcggttttgccgagaaactgcgggcagactggcagtgggtgatcccgcttccggagagcatcgatattgagtcggcaggtcctctgttatgcggcggtattacggtttttaaacctctgctgatgcaccacatcaccgcgaccagtcgcgtgggggtgatcggcatcggcggtcttgggcacattgccattaaactgttgcacgcaatgggctgtgaagtgaccgcattcagctcgaatccgtcgaaagaacaggaagtgctggcaatgggggcggataaagtcgtgaacagtcgcgatccagacgcgttaaatgcgctggcaggccagtttgatctcattatcaacaccgttaatgtcgacctcgactggcagccctactttgaagcgctggcctatggcggccatttccacaccgtcggcgcagtgatgaagccgctgccggttccggcgtttacattgattgctggcgatcgcagcatctccggctcagcaaccggtacgccctatgagctgcgcaaattgatgaagtttgccgggcgcagcaaggtctcgccgacgacagagctgttcccaatgtcgcaaatcaacgaagccatccagcacgttcgcgacggcaaagcgcgttaccgcgtggtactgcaagccgacttttgaatcgataggaggactaatgtatggttatgatggtaaagtattaagaattaatttaaaagaaagaacttgcaaatcagaaaatttagatttagataaagctaaaaagtttataggttgtaggggactaggtgttaaaactttatttgatgaaatagatcctaaaatagatgcattatcaccagaaaataaatttataattgtaacaggtcctttaactggagctccggttccaactagtggaaggtttatggtagttactaaagcaccgcttacaggaactataggaatttcaaattcgggtggaaaatggggagtagacttaaaaaaagctggttgggatatgataatagtagaggataaggctgattcaccagtttacattgaaatagtagatgataaggtagaaattaaagacgcgtcacagctttggggaaaagttacatcagaaactacaaaagagttagaaaagataactgagaataaatcaaaggtattatgtataggacctgctggtgaacgattgtctcttatggcagcagttatgaatgatgtagatagaactgcagcaagaggcggcgttggtgcagttatgggatctaaaaacttaaaagctattacagttaaaggaactggaaaaatagctttagctgataaagaaaaagtaaaaaaagtgtccgtagaaaaaattacaacattaaaaaatgatccagtagctggtcagggaatgccaacttatggtacagctatactggttaatataataaatgaaaatggagttcatcctgtaaagaattttcaagagtcttatacgaatcaagcagataaaataagtggagagactcttactgctaaccaactagtaaggaaaaatccttgttacagctgtcctataggttgtggaagatgggttagactaaaagatggcacagagtgcggaggaccagaatatgaaacactgtggtgttttggatctgactgtggttcatatgatttagatgctataaatgaagctaatatgttatgtaatgaatatggtattgatactattacttgtggtgcaacaattgctgcagctatggaactttatcaaagaggatatataaaagacgaagaaatagctggagataacctatctctcaagtggggtgatacggaatctatgattggctggataaagagaatggtatatagtgaaggctttggagcaaagatgacaaatggttcatataggctttgtgaaggttatggagcaccggagtattctatgacagttaaaaagcaggaaattccagcatatgatccaaggggaatacagggacacggtattacctatgcagttaataatagaggaggctgtcatattaagggatatatgattaaccctgaaatattaggttatcctgaaaaacttgatagatttgcattagatggtaaagcagcttatgccaaattatttcatgatttaactgctgtaattgattctttaggattgtgcatattcactacatttgggcttggaatacaggattatgtagatatgtataatgcagtagtaggagaatctacttatgatgcagattcactattagaggcaggagatagaatctggactcttgagaaattatttaatcttgcagctggaatagacagcagccaggatactctaccaaagagattgttagaagaacctattccagatggcccatcaaagggagaagttcataggctagatgttcttctgccagaatattactcagtacgaggatggagtaaagagggtatacctacagaagaaacattaaagaaattaggattagatgaatatataggtaagttctagatcgataggaggacgaatgcctatggacttaagagataataagcaaagccaaaagaaatggaaaaatagaactttaacttccagccttgaattcgctttaacggggatttttacggcttttaaagaagagcgtaatatgaaaaaacatgcagtgtcagctcttttagctgtcattgctggtttggtttttaaagtatcagtcattgagtggctttttcttttattaagtatttttttggttattacctttgaaattgtcaattcggctattgaaaatgtggttgatttggccagtgactatcatttttccatgttggctaaaaatgctaaggatatggctgcaggagctgttcttgtcatttcaggttttgctgccttgacaggcttgattatttttttattaaaaatttggtttttgctttttcattaagctcagctagcacccggaattgtgagcggataacaattccttggaattgtgagcggataacaattataattaagttgttaggaggttagaatgtgtgctactagtagtcagtttactcaaatcactgaacataattcgagaagaagtgctaattaccaacctaatctatggaatttcgagtttcttcaaagtttggaaaatgatttgaaggttgaaaaactagaagagaaagctacaaagttagaagaagaagttaggtgtatgatcaatcgagttgatactcaacctttatccttacttgaattaatagatgatgttcaaagattaggacttacctataagtttgagaaagacataatcaaagcgttagagaacatagtactattagacgaaaacaaaaagaataagtctgatttacatgctacagcactttcgtttagacttctaagacaacatggttttgaagttagtcaagatgtatttgagagatttaaagataaagaaggtggattttcaggagagttaaaaggtgatgttcaaggtttgttaagtctgtatgaagcatcttatttgggatttgaaggagaaaacctgttagaagaagctagaacattttcgataactcatctgaaaaataacctcaaagaaggaatcaacacaaaagttgctgaacaagtttctcatgcattagagttaccttatcatcagagattacatcgattagaagcaagatggtttttggacaaatacgaacctaaagaacctcatcatcagctcttgttagaacttgcaaagttagattttaatatggtccaaacattacaccaaaaggaattacaggatctaagtagatggtggactgaaatgggtttagctagtaaacttgactttgttagagacagattaatggaagtgtatttttgggcattaggaatggctcctgatccacaatttggtgaatgtagaaaagctgtaacgaaaatgttcggattagtaacgattatagatgatgtctatgatgtttacggtactttagatgaattgcaactctttacagatgcagttgaaagatgggatgtaaatgcaatcaatacgttaccagattacatgaagttatgctttttagcgttgtataataccgtcaatgatacttcatattccatacttaaggaaaaaggccacaataatctttcctatttaaccaagtcatggagagaattatgtaaggcatttttacaggaagcaaaatggtctaacaataaaataatcccagcattctctaaatatcttgaaaatgcttccgtatcatcttcaggagttgcattattagcaccatcttattttagcgtttgtcaacaacaagaagatatcagtgatcatgctctaagatccttaactgattttcatggattagtcagaagttcatgtgttatattccgtctttgtaatgatttagctacaagtgcagctgaattagaaagaggtgaaactacgaatagtattatatcctatatgcacgaaaatgatggaacaagtgaagaacaagctagagaagaattacgcaagttaattgatgcagaatggaagaaaatgaatcgtgaaagagtatctgatagcacattattacccaaagcttttatggagattgcagtaaatatggctagagtaagtcattgcacatatcagtatggagatggattaggtagacctgattatgctacagaaaatcgcataaaactcttattaatagatcctttcccaatcaatcagctaatgtatgtttagtactatcataaaaataagaagcctgcatttgcaggcttcttatttttat

SEQ ID NO: 47 - DNA, 36941 bp, artificial sequence
  plasmid SG739
aaggccagcaaaaggccaggaaccgtaaaaaggccgcgttgctggcgtttttccataggctccgcccccctgacgagcatcacaaaaatcgacgctcaagtcagaggtggcgaaacccgacaggactataaagataccaggcgtttccccctggaagctccctcgtgcgctctcctgttccgaccctgccgcttaccggatacctgtccgcctttctcccttcgggaagcgtggcgctttctcatagctcacgctgtaggtatctcagttcggtgtaggtcgttcgctccaagctgggctgtgtgcacgaaccccccgttcagcccgaccgctgcgccttatccggtaactatcgtcttgagtccaacccggtaagacacgacttatcgccactggcagcagccactggtaacaggattagcagagcgaggtatgtaggcggtgctacagagttcttgaagtggtggcctaactacggctacactagaagaacagtatttggtatctgcgctctgctgaagccagttaccttcggaaaaagagttggtagctcttgatccggcaaacaaaccaccgctggtagcggtggtttttttgtttgcaagcagcagattacgcgcagaaaaaaaggatctcaagaagatcctttgatcttttctacggggtctgacgctcagtggaacgaaaactcacgttaagggattttggtcatgagattatcaaaaaggatcttcacctagatccttttaaattaaaaatgaagttttaaatcaatctaaagtatatatgagtaaacttggtctgacagctcttcctttttcaatattattgaagcatttatcagggttattgtctcatgagcggatacatatttgaatgtatttagaaaaataaacaaataggggttccgcgcacatttccccgaaaagtgccacctgacggtcctaaatttatattttttactttataatatataattgattatagaatccaaattagataggaggaccaggtaaatggagaataattttattgtcaacgaaaacgagaaaagggttttaaagcagatatttaacaactccaatatcagtagaactcaaatttccaagaatttagaactgaataaagcaacaatttcgaacattcttaacaatctaaagcataaaagtttggtaaatgaagttggtgaaggaaattctactaaaagtggtggaagaaaacctatacttctcgaaattaatcaaaagtatgggtattatataagcatggatttgacatatgattctgttgagttaatgtataactattttgatgctacaattctcaaacaagatagttatgaactgaatgataagaatgtaagtagcatattacagatactcaaatctaacataaatgttagcgaaaaatacgacacattatacggtttattagggataagtatatccatacatgggattgtagatgatgaacaaaacatcattaatctaccatttcacaagaatgaaaaaagaacgtttactgatgaacttaagtctttcactaatgtaccagtggttattgaaaatgaggcaaatttaagtgcattatacgagaaaagtttatacatcaattcgaatattaacaacttgatcacattgtctatacataaaggtataggagctggcatcataatcaataagaaactctatagaggtagtaatggagaagctggagaaataggaaagactcttgttttagagtctatcaataacaatgataacaagtactataaaatagaggatatttgtagtcaagacgctttgatacaaaagattaataacagattaggagttacacttacatttaccgaactaatacagtattataacgaaggaaatagtattgtagctcatgaaatcaaacagtttatcaacaaaatgactgtcttaatacacaatcttaatactcagtttaatccagatgcaatatacatcaattgtcccttgattaatgaacttcctaatattctaaacgaaatcaaagaacaattctcttgtttttcacaaggaagtcctatacaattgcatttaaccactaatgttaaacaagctacattattaggtggaacattagcaattatgcagaaaacccttaacataaacaatatccaaatgaatattaaatagttacagcagtctgagttataaaatagatatctcggaccgtctattcttccttatttgagtgggtaccaatgaaatctttcgagctaaatcgatttctggcccactcttttttattttttagtaagcgtttacaaaaaatgaacaatgtgctatattacctctaaagttagtttgtttattaaattaaccaactaaaatgtcgggatccttactgcaataggttgctactgttttatcatgaatcatcaacgaatgtattttgcatatttcagtatctttaataaactctttgcaatttttacaagttttcatatacgcccttcttttcataaattaatttatgaattctatgtattccaaggagcttttggatccaattaggaggaatctgcgatggaaaagaaggaatttagagttttaataaagtattgttttcttaaaggaaagaatacagtagaagctaagacttggttagataatgaatttccagattctgctcctggtaaaagtacaattatagattggtatgcaaaatttaaaagaggagaaatgtcaacagaagatggagaaagatctggtagaccaaaagaagttgtaactgatgaaaatataaagaagatacataaaatgatattaaatgatagaaagatgaagttaatagaaatagcagaagctttaaaaatatctaaagaaagagttggacatataatacatcaatatttagatatgagaaaattatgtgcaaaatgggttccaagagaattaacttttgatcaaaagcaaagaagagtagatgatagtaagagatgtttacaattattaacaagaaatactccagaatttttcagaagatatgtaacaatggatgaaacttggttacatcattatacacctgaaagtaatagacaatcagcagaatggacagctactggagaaccatcacctaaaagaggaaagactcaaaagagtgctggaaaggttatggcatcagtattttgggatgctcatggtataatatttatagattatttagaaaaaggaaaaacaataaattctgattattatatggcattattagaaagattaaaagttgaaatagcagctaaaagaccacatatgaagaagaaaaaagtattatttcatcaagataatgctccttgtcataagtcattaagaactatggcaaagatacatgaattaggttttgaattattaccacatccaccttattcaccagatttagctccttctgatttctttttatttagtgatttaaagagaatgttagcaggaaagaagtttggttgtaatgaagaagttatagcagaaacagaagcttattttgaagcaaaacctaaggaatattatcaaaatggaataaagaagttagaaggtagatataatagatgtatagcattagaaggaaattatgtagaataagaattccttaattaaggagctcgataaaaataagaagcctgcatttgcaggcttcttatttttatggtgcatcagctcttatatattaagctaccaacttagtatataagccaaaacttaaatgtgctaccaacacatcaagccgttagagaactctatctatagcaatatttcaaatgtaccgacatacaagagaaacattaactatatatattcaatttatgagattatcttaacagatataaatgtaaattgcaataagtaagatttagaagtttatagcctttgtgtattggaagcagtacgcaaaggcttttttatttgataaaaattagaagtatatttattttttcataattaatttatgaaaatgaaagggggtgagcaaagtgacagaggaaagcagtatcttatcaaataacaaggtattagcaatatcattattgactttagcagtaaacattatgacttttatagtgcttgtagctaagtagtacgaaagggggagctttaaaaagctccttggaatacatagaattcataaattaatttatgaaaagaagggcgtatatgaaaacttgtaaaaattgcaaagagtttattaaagatactgaaatatgcaaaatacattcgttgatgattcatgataaaacagtagcaacctattgcagtaaatacaatgagtcaagatgtttacataaagggaaagtccaatgtattaattgttcaaagatgaaccgatatggatggtgtgccataaaaatgagatgttttacagaggaagaacagaaaaaagaacgtacatgcattaaatattatgcaaggagctttaaaaaagctcatgtaaagaagagtaaaaagaaaaaataatttatttattaatttaatattgagagtgccgacacagtatgcactaaaaaatatatctgtggtgtagtgagccgatacaaaaggatagtcactcgcattttcataatacatcttatgttatgattatgtgtcggtgggacttcacgacgaaaacccacaataaaaaaagagttcggggtagggttaagcatagttgaggcaactaaacaatcaagctaggatatgcagtagcagaccgtaaggtcgttgtttaggtgtgttgtaatacatacgctattaagatgtaaaaatacggataccaatgaagggaaaagtataatttttggatgtagtttgtttgttcatctatgggcaaactacgtccaaagccgtttccaaatctgctaaaaagtatatcctttctaaaatcaaagtcaagtatgaaatcataaataaagtttaattttgaagttattatgatattatgtttttctattaaaataaattaagtatatagaatagtttaataatagtatatacttaatgtgataagtgtctgacagtgtcacagaaaggatgattgttatggattataagcggccggccagtgggcaagttgaaaaattcacaaaaatgtggtataatatctttgttcattagagcgataaacttgaatttgagagggaacttagatggtatttgaaaaaattgataaaaatagttggaacagaaaagagtattttgaccactactttgcaagtgtaccttgtacctacagcatgaccgttaaagtggatatcacacaaataaaggaaaagggaatgaaactatatcctgcaatgctttattatattgcaatgattgtaaaccgccattcagagtttaggacggcaatcaatcaagatggtgaattggggatatatgatgagatgataccaagctatacaatatttcacaatgatactgaaacattttccagcctttggactgagtgtaagtctgactttaaatcatttttagcagattatgaaagtgatacgcaacggtatggaaacaatcatagaatggaaggaaagccaaatgctccggaaaacatttttaatgtatctatgataccgtggtcaaccttcgatggctttaatctgaatttgcagaaaggatatgattatttgattcctatttttactatggggaaatattataaagaagataacaaaattatacttcctttggcaattcaagttcatcacgcagtatgtgacggatttcacatttgccgttttgtaaacgaattgcaggaattgataaatagttaacttcaggtttgtctgtaactaaaaacaagtatttaagcaaaaacatcgtagaaatacggtgttttttgttaccctaagtttactctatcattgatagagtgcgactctatcattgatagagtccacaggttggctgataagtccccggtctgtaccgttcgtataatgtatgctatacgaagttataggaggttataatgaacgagaaaaatataaaacacagtcaaaactttattacttcaaaacataatatagataaaataatgacaaatataagattaaatgaacatgataatatctttgaaatcggctcaggaaaagggcattttacccttgaattagtacagaggtgtaatttcgtaactgccattgaaatagaccataaattatgcaaaactacagaaaataaacttgttgatcacgataatttccaagttttaaacaaggatatattgcagtttaaatttcctaaaaaccaatcctataaaatatttggtaatataccttataacataagtacggatataatacgcaaaattgtttttgatagtatagctgatgagatttatttaatcgtggaatacgggtttgctaaaagattattaaatacaaaacgctcattggcattatttttaatggcagaagttgatatttctatattaagtatggttccaagagaatattttcatcctaaacctaaagtgaatagctcacttatcagattaaatagaaaaaaatcaagaatatcacacaaagataaacagaagtataattatttcgttatgaaatgggttaacaaagaatacaagaaaatatttacaaaaaatcaatttaacaattccttaaaacatgcaggaattgacgatttaaacaatattagctttgaacaattcttatctcttttcaatagctataaattatttaataagtaagttaagggatgcataaactgcatcccttaacttgtttttcgtgtacctattttttgtgaatcgattatgtcttttgcgcattcgtcgacaattgcatatattgataaaaataataatagtgggtataattaagttgttaggaggttagttagaatgagtagactcgataagtctaaagtgataaattccgcattagaactccttaatgaagttggaattgaaggtctaactaccaggaaattagctcagaaacttggagttgaacaaccaacattgtactggcatgtcaaaaacaaaagagcactcttagatgcattagcaatcgaaatgttagacagacatcatacacacttttgtccattagaaggtgaaagttggcaagactttttgaggaataacgcgaaaagtttcagatgtgctttactatcccatagagatggggctaaagttcacttaggaactagacctacagaaaagcagtatgagacacttgaaaatcagttggcatttctatgtcaacaaggattctcattagagaacgcattatatgctctttcagctgtaggtcatttcacgttaggttgtgttttggaagatcaagaacatcaagttgcaaaagaagagagagaaactcctactacagatagtatgccacctttattacgacaagctatagaactgtttgatcatcaaggagctgaacctgcgtttctctttggattggagttaataatttgcggactagagaaacagcttaagtgtgaaagtggatcttagttagcaccggtcagggtggtgaatgtgaaaccagtaacgttatacgatgtcgcagagtatgccggtgtctcttatcagaccgtttcccgcgtggtgaaccaggccagccacgtttctgcgaaaacgcgggaaaaagtggaagcggcgatggcggagctgaattacattcccaaccgcgtggcacaacaactggcgggcaaacagtcgttgctgattggcgttgccacctccagtctggccctgcacgcgccgtcgcaaattgtcgcggcgattaaatctcgcgccgatcaactgggtgccagcgtggtggtgtcgatggtagaacgaagcggcgtcgaagcctgtaaagcggcggtgcacaatcttctcgcgcaacgcgtcagtgggctgatcattaactatccgctggatgaccaggatgccattgctgtggaagctgcctgcactaatgttccggcgttatttcttgatgtctctgaccagacacccatcaacagtattattttctcccatgaagacggtacgcgactgggcgtggagcatctggtcgcattgggtcaccagcaaatcgcgctgttagcgggcccattaagttctgtctcggcgcgtctgcgtctggctggctggcataaatatctcactcgcaatcaaattcagccgatagcggaacgggaaggcgactggagtgccatgtccggttttcaacaaaccatgcaaatgctgaatgagggcatcgttcccactgcgatgctggttgccaacgatcagatggcgctgggcgcaatgcgcgccattaccgagtccgggctgcgcgttggtgcggacatctcggtagtgggatacgacgataccgaagacagctcatgttatatcccgccgttaaccaccatcaaacaggattttcgcctgctggggcaaaccagcgtggaccgcttgctgcaactctctcagggccaggcggtgaagggcaatcagctgttgcccgtctcactggtgaaaagaaaaaccaccctggcgcccaatacgcaaaccgcctctccccgcgcgttggccgattcattaatgcagctggcacgacaggtttcccgactggaaagcgggcagtgagcgcaacgcaattaatgtaagttagctcactcattaggcaccgggatctcgaccgatgcccttgagagccttcaacccagtcagctccttccggtgggcgcggggcatgactagcatgatcgtgctcctgtcgttgaggacccggctaggctggcggggttgccttactggttagcagaatgaatcaccgatacgcgataacttcgtataatgtatgctatacgaacggtagctcagctagcacccggaattgtgagcggataacaattccttggaattgtgagcggataacaattataattaagttgttaggagggaacttagatgaaggtaactaatgttgaagaactgatgaaaaaaatgcaggaagtgcaaaatgctcaaaaaaaatttgggagttttactcaggaacaagtagatgaaattttcaggcaagcagcactagcagctaacagtgccagaatagatctagctaaaatggcagtggaagaaactaaaatgggaattgtagaggataaggttataaaaaatcattttgttgcagaatacatatataataagtataaaaatgaaaaaacttgtgggattttggaagaagatgaaggctttggaatggttaaaattgcagaacctgtaggtgtgattgcagcagtaattccaacaacaaatccaacatctacagcaatatttaaagcattattagctttgaaaacaagaaatggtataattttttcaccacatccaagagcaaaaaagtgtactattgcagcagctaagttagttcttgatgctgcagttaaagcaggtgctcctaaaggaattataggttggatagatgaaccttctattgaactttcacagatagtaatgaaagaagctgatataatccttgcaacaggtggtccaggtatggttaaagcagcttattcttcaggtaaacctgctataggggttggtcctggtaacacacctgctttaattgatgaaagtgctgatattaaaatggcagtaaattcaatacttctttccaaaacttttgataatggtatgatttgtgcttcagagcagtcggtagtagttgtagattcaatatatgaagaagttaagaaagaatttgctcatagaggagcttatattttaagtaaggatgaaacaactaaagttggaaaaatactcttagttaatggtacattaaatgctggtatcgttggtcagagtgcttataaaatagcagaaatggcaggagttaaagttccagaagatgctaaagttcttataggagaagtaaaatcagtggagcattcagaagagccattttcacatgaaaagttatctccagttttagctatgtatagagctaaaaattttgatgaagctcttttaaaagctggaagattagttgaactcggtggaatgggtcatacatctgtattatatgtaaatgcaataactgaaaaagtaaaagtagaaaaatttagagaaactatgaagactggtagaacattaataaatatgccttcagcacaaggtgctataggagacatatataactttaaactagctccttcattaacattaggttgtggttcatggggaggaaactccgtatcagaaaatgttggacctaaacacttattaaatataaaaagtgttgctgagaggagagaaaatatgctttggtttagagttcctgaaaaggtttattttaaatatggtagtcttggagttgcattaaaagaattagatattttggataagaaaaaagtatttatagtaacagataaagttctttatcaattaggttatatagatagagttacaaagattcttgaagaattgaaaatttcatataaaatatttacagatgtagaaccagatccaaccctagctacagctaaaaaaggtgcagaagaattgttatcatttaatccagatactattatagcagttggtggtggttcagcaatggatgctgctaagattatgtgggtaatgtatgaacatccggaagtaagatttgaagatttagctatgagatttatggatataagaaagagagtatatacttttcctaagatgggtgaaaaagcaatgatgatttctgttgcaacatcagcaggaacaggatcagaagtaacaccttttgcagtaattactgatgaaaaaacaggagctaaatatccattagctgattatgaattaactccaaatatggctataattgatgctgaacttatgatgggtatgccaaaaggattaacagcagcttcaggaatagatgcactaactcatgcaatagaagcttatgtatcaataatggcttcagaatatactaatggattagcgttagaagcaataagattgatatttaagtatttaccaatagcttacagtgaaggaacaacaagtataaaggcaagagaaaaaatggcgcatgcttcaacaatagctggtatggcatttgctaatgcatttttaggagtatgtcattcaatggcacataaattaggatcaactcatcacgtaccacatggcattgccaatgcactacttataaatgaagttataaaatttaatgcagtagaaaatccaagaaaacaagctgcatttccacaatataagtatccaaatataaaaaagagatatgctagaatagcagattaccttaacttaggtgggtcaacagacgatgaaaaagtacaattattaataaatgctatagatgaattaaaagctaagataaatattccagaaagtattaaagaagcaggagtaacagaagaaaaattttatgctactttagataaaatgtcagaattagcttttgatgatcaatgtacaggtgcaaaccctagatatccattaataagtgaaataaaacaaatgtatgtaaatgcatttatgactaggaggatcgataatgagcgcacccaccatcgaatccgagcagtcgacagacatcggctacgtgttcgaggttccggatcggccgaacggcccggccgttcgccgactactgcggcgcagcggcgcactgctgggagccgtcgggacggtggccacgctgaccgcgtggcgcagcaaacggccacgggttcgggcgatagcgctcggactgctggccccgggcggcggtcagctctatacccgcagcccgttgcgattcgtggccacggtcgccggcttcttcgcatcgctggtcgcgtggttcggcagcggcaacatcatcgccccggtcctggtgtggctgacggcggcgaccaacgccggcagtcacgccgccggcggccggaggacctggaacggtgcacgccgggtgattccgacggcggtggcgggggccgccgccgccggaatagtggcccgacgccgggcctttcacgccgcgcaggcccgtgggagaactcgtgccgagtatctgacgacagcgcctcgtctggacccgcagccgaaagatgcggcatccgaggaactgtcgcccaccgatctcgcggtcctgcgctcgctgctggaccgggcgctgcagcccctggagaatttcgacgggttcgaccgtatcgaccagttccagacttcggcgatgcgctaccagtgcaacttcatgcagtacgcgctggccacagcacaactgcacgccacgccgtcgttccacggttatctgtcggccgcacaacgcaatctgatcgacaagctcacgctgccggcggtgtggcgctactgggccttcgaacagacctggggcaatctcagtctggactgggacccgatgaaacgcgacaacatcatgctctcgggatacctaggcatgatgctgggtgcctacgaatccaacaccggcgacgaccgttaccgccgcagtggggcgttgcccttccggttggggaaacgcgactggccctacacccacgacatggtgagtgctgccgtgcacgacaacatgcagcgctccggtatgacgctgttcccctgcgaaccgaactggatctacagcgcctgcaacatgccggcgatcagctcgctgatgatgtccgaccgcctgcacggcacccggtacatcgaatcggtcggcgaggactttcgacgccggctgcacggcgaattcattactcccgatggccgtatcaccgcaatacggtcctcgcggctgggcgtgaccatcccgatgctcacctccacaatggccgactgcggcctggcgtccatgctgcacgcattcgatccggaactggcacagcggtgctggaccatcgcccgtcgtgagttcattgacacgactgggcccgaaccggtcatcgtgctgcgggggtgggacgcgatcgataccggcaactaccgtaagacgacgttgggcgccgtcgcacccgtcatgtgggcggccgccgagatgggcgacacagatctggtcgcccagctgaccaccacgttggagcggcatgcacagcccaccgagaccggcggagcccgctggtacgccgagctgtcgaccaatatgaacgcgatggcggccctggcgcgattcaacccgcccggtggccagcgggcgctgatcagtgccggacccggcacgcagatcctgaccggaccggtgctcgacgacgtcgtgtacccagaggtcctggtggcgtcggcacgcaccgatggagccgacctgcggctggtactgcggcccggggctggtgccgcacgcgtgagcatcggagtgcgacacctgcatcccggcggccgctaccgggtgaacggcgccgtcgacagcgaggtgaccgccgacaaccagggccgcagtcacctggaggtcgacctgatcgaccgcaccgaagtctccctgacaccggcgccatgaagtacgataggaggatcactatgtatgattttgtgattattggcggtggcatcatcggcatgtcgaccgccatgcaactgattgatgtctacccggacgcccgcattgcgttgctggaaaaagagtccggcccggcctgtcaccagacgggccacaacagcggcgtgatccatgccggggtttattacacgcccggtagcctgaaggcacagttttgcctggcgggaaaccgcgccactaaagccttttgcgatcaaaacggcattcgctatgacaactgcggcaagatgctggtcgccacctctgaactcgaaatggaacggatgcgcgcgttgtgggaacgcacggcggcaaacggtatcgagcgcgagtggttaaacgccgatgaactgcgcgagcgcgaaccgaatatcaccgggcttggcggtatttttgtgccgtccagcggcattgtcagctaccgcgaagtaacggcggcgatggcaaaaattttccaggccagaggcggcgagattatctataacgccgaagtcagcggcctcagtgagcataaaaacggcgtggtgatacgtacccgccagggcggcgaatatgaagcatcgacgctgattagctgttccgggctgatggctgaccggctggtgaaaatgctcggactcgaaccgggctttatcatctgcccgttccgtggtgagtatttccgccttgcgccggagcataaccagattgttaaccacctgatttaccccattcccgaccccgcgatgccatttttgggcgtgcatctcacccgaatgatcgatggcagcgtgaccgtcgggccaaacgcggtgctggcttttaaacgcgaaggctaccacaagcgcgacttctcgtttagcgacacgctggaaattttgggctcgtcggggattcgccgggtgctgcaaaaccatctacgctcaggactgggcgagatgaaaaactcgctgtgcaaaagcggctatctgcggctggtgcaaaagtattgtccccggctttcgttaagcgatctccagccctggcccgccggtgtgcgggcgcaggcggtatcgccggacggcaagctgattgacgattttctgtttgtcaccaccccgcgcacgatccacacctgcaatgcgccctccccggcagcgacatcagcaattcctattggtgcgtatattgtcagcaaggtacaaacgctgttggcaagccagagtaaccccggacgcacgctgcgagcggcacgtagtgtggatgccttacacgccgcatttaatcaataaaagtcgactgaggaggatcatcatgacattacaagaggcagttgcaaagtttgttgaagatggcgacgctatctccttcggcggctttacaacaaacaagaaacctatggctgctgttcgcgagattctgcgccagggcaagaaagacttcatcgcatatgcaggtcctgccggatctgactgggatatgctgattggagaggatcgcgtaaaagcgtacatcaactgctatacagctgactccggtgttaccaacgtttcccgtcgtttccgcaaaaaaatcgaggccggcgagctgatctatgaggactactcccaggatgccatcatgtacatgcttcacgctgcttccttaggtcttccattcttaccggtacgttttatgatcggttccggactggttgatgagtggggaatcacaaaggaagtgcgccagactatcgacaagctgccgaacgacaaatttgtgtacatggacaacccatttaacccaggtgagaagaccgtatgccttccagttccgcagctggatacagcaatcatccacgtacagaaggcttcacctgacggaacctgcattctgctcggcgacgagttccacgatgtagatattgctgttgcagctaagaaggttatcgttacatgtgaggagctggtaagcaacgaagtgatccgcagagatccaacccttacaaagattccgtgcttcgcagttgacgctgtctgcgttgctccttacggcgcatacccgacacagtgctacggctactatgattatgacaacagcttcctgaaggcttatggcgcagccagcaagacagaggaggatttcaaggcattcttaaaagagtacgtttacgacgtgaaagacaatgaagagttccttgagaagatcggtgtaaatcgtctccttaagttaaaagtatctgatggctttggatatgcaacagatgtaagcaaggaggattaagtagctgaggaggatctagaatgggtcaaaaatcaaaggcaatgacacttgtaaagaatttattagataatcattataaagaagtaaatatggcaaaagaaagaggggaactagttggttggtcaacatcaatatttcctcaagagattgcagaaacatttggattacatgtattatatcctgaaaatcatgcggcagcagtagcagccaagcacgaatctttgaaagtatgcgaagttgctgaaagtaaaggatattcaatagatatatgttcttatgctagagtaaatttaggatatgtagacttaaagaaaatagaaagtataaacatgcctcaaccagacttcatactttgctgtaataacatatgtaataccgttataaaatggtatgaaaacatagcaaaggaattaaatattcctatgattttaatggataccccttttaacagtgaatacgaaattactcaagaaagaattgattatttcaaaggacagcttcaagaggctataagaaaattagaagaaattacaggtaaaaaatttgaccaaaagcgttttgaagaagttatgaaaatatccacagaagcgggaaatttgtggaaagaatctatgagtctaacaaaggctattccagcaccaatgaatggatttgaaatgtttaattatatggctgttatagtttgtgctcgtgggaaaaaggaaactgtagaaatttttaagactcttatagatgaattgcaagaaagaatagataagggagaaacaagttatagaggagaacaaaaacacagaatcatgtttgaaggtataccatgttggccatatctaagttataaattaagatcattaaatgataaaggaattaatatggtaggtagtgtttatacggatgcgtgggcacttcaatatgaatcaaatgatcttgatggaatggcaaaagcatattgtagcataatgaataatgttaatttagatagacaagtagacatgagagctaaagttattagagattttaagtgtgatggagcaatatatcatatgaatcgaagctgtaagctaatggattttatgcaatatgagttagaaagaagagtagaagcaaaaactaatgtgccatatattggatttgatggggaccaagcagatccaaggaacttcacaaaagctcagtttgaaacaagagtacaaggacttgcagaagttatggaagaaagaaaaaatgtaggaggtgtaaagcatgaatagagatgactgcaggaggatctacaatggctgataagaaagaggtcaaaaagaatgcagcaaaagtgattaatggtatattagctaaatcttatgcagatgcttggaaggcaaaagaagaaggaagaccggttggttggtcaacttccgtatttccacaggaattagtagaagtttttggtttagacgtattatatccagaaaaccaagctgcaggggttgcagctaagaaagaatctttatctctttgtgaagctgcagaaagtgctggatattcaattgatttatgtgcatatgcaagaacaaattttggacttttagaaaagggtggttcagaaaacttaaatatgccaaagcctgactttatatgctgctgtaataatatttgtaatcaagttattaaatggtatgaaaacattgcaaaggaattagatataccattaataatgattgatactacatttaataatgaaaatgaggtaacagaaaatagaattaaataccttagagctcaatttgaagaggctataaaacaacttgagaaaatttctggaaagaaatttgatcccaagaagtttgaagaagttatgaaaatctccgctgaaaacggtaagctttggaaatattctatgagtttaccatcaggatctttcccatcaccaatgaatggatttgacttatttacttatatggctgttatcgtatgctatagaggtaaaatagaaactacagaagcttttaaattattgatttctgaattagaagataatattagaaataaagcaacttcctttagaggagaagagaaatatagaattatgatggaaggaattccatgctggccatatataggctataagatgagaactttagcaggctatggtgttaatatgactggaagcgtttaccctcatgcttgggcattacagtatgaagtaaacgatttagatggaatggctaaagcttacagtactatgtttaataatgttaacttagaaagaatgtgtaaatacagagtagattctttaatagatggaaattgtgatggagcattctatcatatgaatagaagctgtaaattgatgagttttatacaatatgaaatggaaagacaagtttttcaaaaaacaggcataccatatgcgggcttcgatggagaccaagcagatccaagaaactttagtaaggctcagtttgaaacaagactgcaagggctagtagaagttatggaagaaagaaagaaaggaggaaacaaataaagctgagcaggaggatctacatgaaagcattatctattaaaccagaaatctatacctttgatacatgtaaagaatttataaacaaatttaaaataggaaaagaagatttaattattacaagtgagcatacttatgtttcatatttttctaaatataaccttgataccaatgtaatctttattagaaaatacggcactggagagccaagtgatacaatggtagaagcaatttgtaaggatataaaagatattacttataaaagagtaattgctattggcggcggaagtgtccttgacgtttcaaaattgtttgcattaaagaaagtctcgccagtacttgatttatttgatcacaaattagaatttgtaaaagataaggaattgatcctaattccaacaacttgcggaacaggcagtgaagtaactaatatttctattcttgaattgaagtcaagacatacaaaattaggtcttgctatagatgaactatatgcagattttgctgttatgattccagaacttctagagaatttaccctttaaattttttgcaactagttccattgatgccttgattcattccattgaatccagtgtttcaccaaaagctacaagctatacagaaatgttttcctataaagcaatggaaatgatcttaaaaggatatcaggagatttcaaaaaatggcccagacgccaggttttccttgttagataaatttttacttgcaagcaattatgctggaattgcatttggcaatgcagggtgtggtgcagtacatgctatgagttatcctttaggtgctaattaccatgttcctcatggagaagcaaattatcaaatgttcattggagtatttaaaacctattatcgtttaaaaccacaaggtaaaattacaaaactaaataaattcttagcatccattttaaactgcaaagaaaatgaagtttacattaaaatagaagagttattaaatgtattgattcctaaaaaacaattacgtgagtatggggtaaaagaaaaagaattaaaggaatttacacaaagtgttatgactaaacaaggtcgtttaatggcaaataactatacagaattaaatgaacaaactgtatatgaaatatataaatcattatattaagctcagctagcacccggaattgtgagcggataacaattccttggaattgtgagcggataacaattataattaagttgttaggaggttagaatgttgaaggaacaattacctaaaataataactgataaagtccctggaccgaaagcagaagaagtaatacgaagaagagaagatgcagtaccctctgcaattaaatgtgtatatcctgttgtaataaaaagggcagaaggtgcggtgattgaggatgttgatgaaaattattttcttgactggactggtggtgtaggcgtactaaacgttggattttcccatccagaagtggttgaagctgtgaaagaacagtcagagaagtatttccatggtatgtttaatattgttacacacgaaggatatgttaagctggcagagaaaatgaactccattgttcctgtaaagggaaataagaaaaaaacgtttttcgcaaatagtggagcagaggctgatgaaaatgcagtaaaaatagcaaaagcttttacaaatagacccaatatagttgtattttcaggggcatttcatggacgtacagttatgaccatggcaatgacatcgaaaaaatcttatgcctatggaatgggaccttttccagatggtgtataccgtgcagaatttccgtatttatatagaagtcctgaaggaatgccagagagtgaaaccattaattattatatagaaagtattaaaaaagtatttgatcaagcttcaccaccggagtacgtagcagctatagtagtagaaccacttcagggtgaaggcggatttattccagctcccattgaatgggttaaagcagtaagaactatttgtgataaatatggtatattgcttgttgcagatgaggtacaatgtgggttctgccgtacaggtaaaatgtttgcttctgaatattggaaggaagcaggagcagctccagatataatagcaactgcaaaatctattgcagctggtatgccattaagcgcaataacagcaagggaagagattatggaggcagtaagacccggaacaattggaggaaccttctgtggaaatgcagtagcatgtgcagcagcattaaaagtgatagaaattatggaaagagatcatttggctgaccgttctatggaaataggtaagaaagtaatgaaacgctatatggaatggaaagaaaaatatgagattgttggagatgtaagaggactcggcggaatggttggaatagaatttgtaaaaaacaaagaaaagaaagatccaaatcctgaaattgtatcagcagttattcaagaagcagcccaaaatggacttatgattgagaactcgggtgtttatggaaatgttatccgctttttagcaccacttgtaattacagataagcagcttgaagcaggattagatatttttgaaaaagcaatttctaagtgtatgcaaaagtaagttgaggaggtagataatgtctacaacacataacgtccctcagggcgatcttgttttacgtactttagccatgcccgccgataccaatgccaatggtgacatctttggtggttggttaatgtcacaaatggatattggcggcgctattctggcaaaagaaattgcccacggtcgcgtagtgactgtgcgggttgaaggaatgactttcttacggccggttgcggtcggcgatgtggtgtgctgctatgcacgctgtgtccagaaagggacgacatcggtcagcattaatattgaagtgtgggtgaaaaaagtagcgtctgaaccaatcgggcaacggtataaagcgacagaagcattatttaagtatgtcgcggttgatcctgaaggaaaacctcgcgccttacctgttgagtaaaaaggagtgtatataaatggatggcaaagagtatgttcaaaaagttttaagtactgtacaaaaaagaaatttaggtgaagaagaatttcttgatgcggtaaaagaagttttaacttctttagtacctgtatttgatagaagacctgattttattaaagcaggattacttgaaagattaactgaaccagaaagagctataagttttagagtcccatgggttgatgataatggagaggttcaagtaaacagaggttttagaattcaatttaattcggctataggaccgtataagggtgggttaagatttcatccatctgtaaatcaaagtatcgtaaaatttttaggatttgagcaaatatttaagaactccttaacagggttacctatcggaggagcaaaaggcggttcagattttgatccaaaaggcaaatctgataacgaagttatgagattttgtcaagcttttatgtctgagctgtacaagtacataggttctaatagagatgtacctgcaggagatataggtgtcggtggaagagaaattggatatctatatggctattataataaacttaaaggtgtaagtgaacagggtactttgacaggcaagggactgacttatggaggaagtcttgccagaacagaagcaacaggatatggattagtttattttactgaagaaatgctaaaggatcataatttgagtttcaaagataaaaaagtagtagtttcaggttcgggaaatgtggctatttatgctattgaaaaagcaactgaacttggagctaaagttattacttgttctgattctaatggatatattttagatgaaaatggaattaatctagatgtagtaaaagaaattaaagaagttagaaggggaagaataaaagaatatctaaaaagtgtgcctactgctaagtatgtaccagattttagagaaatttggaatgttaagtgtgacatagctcttccttgtgcaactcaaggtgaaataaatgagaaatctgctaaggctcttgtagaaaatggtgttatagctgtatcagaaggagcaaatatgccgtcaactttagatgcaataaatgtatttttaagtaataagattctttttggaccttctaaggcagctaatgcaggaggagttgcatgttctgctattgaaatgtctcagaatagtataaggtattcatggacatttgaagaggtaaataataagatcaaaaatataatgattaatatttataataattctaaaaacgcggcaaaagaatatggaaatgaaggaaatatagttgtaggagccaatattgctggatttttaaaagttgctgaggctatgatggcccaaggcataatttaaaagacattcgggaggaagaatttaaatgggtttctactctatgcctagatatttccaaaatatgcctcaggtgggcaaacccctgaaaaaggcggatgccgccaatgaagaacagctgaaaaagatcgaagaagagatccatcagctgatcaaagaggctcaggaagccggcaaggcagatgctgatgtaaacaagagaggggaactgaccgctctccagagaattgaaaaactggtggaaccgggctcctggagacccctgaacaccctgttcaaccctcagggcaacaagaacggctccgtggccatcgtcaagggcctgggccgtgtaaacggcaaatggtgcgtggtcgtggcttccgacaacaagaagctggccggtgcctgggtgccaggccaggctgaatgcctgctgcgggcttccgataccgccaagaccctgcacgtgcctctggtgtatgtgctgaactgctccggcgttaagttcgacgaacaggaaaaggtataccccaaccgtcgtggcggcggtacgcctttcttccggaacgctgaactgaaccagctgggcattcccgtcatcgttggcatctacggcaccaaccctgccggcggcggctatcattccatcagccccacggtgatcattgcccatgaaaaagccaacatggctgtgggcggcgccggcattatgggcggcatgaaccccaaaggtcatgtggacctggaatatgccaacgaaatcgccgacatggtggaccgtaccggcaagaccgaacctccgggagctgtcgacatccactacaccgaaaccggtttcatgcgtgaagtctatgcttccgaagaaggcgttctggaagggatcaagaagtatgtaggcatgctgccgaaatacgatcctgaattcttccgggtggacgatccgaaagcaccggcattcccggctgacgacctgtacagcatggttcctctgaacgacaaacgggcttatgacatctacaatgtaattgcccgcctgttcgacaacagcgaactccatgaatacaaaaaaggctacggccctgaaatggtcaccggtctggccaaagtcaacggcctgctggtgggcgttgtggccaacgtccagggtctcctgatgaactaccctgaatacaaggctgcaggctccgtagggatcggcggcaaactgtaccgccagggtctggtgaaaatgaatgaattcgtcaccctgtgcgccagagaccgtctgcccatcgtctggatccaggataccaccgggatcgatgtgggcaacgatgcggaaaaggctgaactgctgggtctgggccagtccctgatctactccatccagacttcccacatccctcaattcgaaattaccctgagaaaaggcacggctgctgcccactacgtactgggcgggcctcagggcaatgacaccaacgccttctccatcggtaccgctgctacggaaatcgccgttatgaacggtgaaaccgctgccaccgccatgtactcccggagactggccaaagaccggaaagccggcaaggatctgcagccgaccatcgacaagatgaacaacctgatccaggctttctacaccaaatctcgtccgaaagtctgtgctgaactgggtctggtggatgaaatcgtggacatgaacaagatccgcgggtatgtggaagccttcacggaagctgcttatcagaatccggaaagcatctgcccgttccatcagatgattctgcctcgtgccatcagagagtttgagactttcgtaaagaaataatccttacaaggaggatctacaatgaccgacaatccttggctgattatgatgatcaacatgaccatcgtattcggtgtgctgattgtgctgggaatcctgatggtgctgatccatgctgtcgatcccaccaagaaagttcagggaaaaaaaaagcctgtagttgctaagccggcgccttccgctgctgccagcaaacggcaggaagaggaaaaagtggctgccatggcagctgtcctggccctggtccaggatgaagacgatatgattgcagctgccctgagtgctgccatcgccgaacacaaaagaaaaatggagccgatgaatctgccccatcattctttctgatgaactgttgagggacggttcattatccacaaaatcaaacaacttgaaaactgtttaggagggattctcatgagaaaattcaatgttaacgttaacggtactgtttacactgtagaagttgaagaagtcggcggcgctgtaactgcagctcctgctgctcctgccgctcctgccgctgctcctgctgccgctcctgtagctgctgctcctgctgctgctcccgctccggctcctgccgctgctcctgctgctgctcccgctccggctgccaaaccggccgctgctgctcctgccggctccgtaaccgtatccgctcccatgcccggcaagatcctgtccgttaacgtaaaacccggcgacaaagtggaagccggcgatgttctgctgatcctggaagctatgaagatgcagaacgaaatcatggctcctgaagacggcacggtttccgaagtccgcgtaaacgctggcgataccgtagccaccggcgacgtaatggttattctctaatcaacgtctccgaacataaaggaggattttagaacatggatgcttttgtggtagccctgacctctgtcatccaggacagtgggtttgtggcttttacctggggcaatgccgtaatgatgctggtcgggtgcatcctgctgtacctggccatcgtcaaaggctttgaacccctgctgctgagcccgatcgccttcgggtgcattctggccaacgtaccccggaccgggttcgaaaccgaccccggcgtcatgcagctgatcctgggcgggatcaaatacgaaatcttccctccgctgattttcatgggcgtaggggccatgaccgactttggtccgctgattgccaaccccaagaccctgctgctgggcgctgctgcccagatcggcgtgttcgtggctctgctgggggccatgctcctgggcttcaatgtgaaggaagcttccgccatcgggatcatcggtggtgctgacggcccgacttccatttacctggcttccaagatggctccccatctgctgggcgccatcgccgtggccgcttattcctacatgtccctggtgcccctgatccagccgcctgtgatgaaactgttcacctccaaggaagaacggaagatcaaaatggcccagctgcgtacggtgacccactttgaaaaagtggtgttccccattgtcaccaccattttcatttccctgctgctgccttccgtatgctctttgatcgggatgctgatgctggggaacctgttcaccgaatccggctgtatggaccgtctgtctgacacggcacagaatgccctgatgaacagcgtgaccatcatgctggccaccggtaccggcctgaccatgaaggccgaaagcttcctgaccttgcagaccatcgaaatcatctgcctgggtctggttgcctttatcggcggcaccgccggcggtgtgctgttcggcaagctgatgagcaagctggacggcggcaagaccaacccgctgattggttctgccggtgtatccgcagtgcctatggctgcccgtgtgtcccaggttgtgggacagcaggctgaccctggcaacttcctgctgatgcacgccatgggccccaatgtggccggggttatcggtacggctgttgcagctggtaccatgctggccatggtgggcggcaaataaagtcaaggaggagcataatggagtgggaagagatatataaagagaaactggtaactgcagaaaaagctgtttcaaaaatagaaaaccatagcagggtagtttttgcacatgcagtaggagaacccgtagatttagtaaatgcactagttaaaaataaggataattatataggactagaaatagttcacatggtagctatgggcaaaggtgaatatacaaaagagggtatgcaaagacattttagacataatgctttatttgtaggcggatgtactagagatgcagtaaattcaggaagagcagattatacaccttgttttttctatgaagtgccaagtttgtttaaagaaaaacgtttgcctgtagatgtagcacttattcaggtaagtgagccagataaatatggctactgcagttttggagtttccaatgactataccaagccagcagcagaaagtgctaagcttgtaattgcagaagtgaataaaaacatgccaagaactcttggagattcttttatacatgtatcagatattgattatatagtggaagcttcacacccattgttagaattgcagcctcctaaattgggagatgtagaaaaagccataggagaaaactgtgcatctttaattgaagatggagctactcttcagcttggaataggtgctataccagatgcggtacttttattcttaaagaacaaaaagaatttaggaatacattctgagatgatatcagatggtgtgatggaactggtgaaggcaggggttatcaataacaagaaaaagaccctccatccaggcaaaatagttgtaacatttttaatgggaacaaaaaaattatatgattttgtaaacaataatccaatggtagaaacttattctgtagattatgtaaataatccactggtaattatgaaaaatgacaatatggtttcaataaattcttgtgttcaagtagacttaatgggacaagtatgttctgaaagtataggattgaaacagataagtggagtgggaggccaggtagattttattagaggagctaatctatcaaagggtggaaaggctattatagctataccttccacagctggaaaaggaaaagtttcaagaataactccacttctagatactggtgctgcagttacaacttctagaaatgaagtagattatgtagttactgaatatggtgttgctcatcttaagggcaaaactttaagaaatagggcaagagctctaataaatatcgctcatccaaaattcagagaatcattaatgaatgaatttaaaaagagattttagagattaaggaggactacgaatgtctttaatgactggggaagaatatgtagaaagtttacgtaaattaaaattaaacgtttattatctgggagagaaaatagataatccagtggataaccctgtacttcgtccatctttaaattctgttaagatgacttatgacttggcccaagaagcagaatatgaggatttaatgacaacaacatcaaatataacaggtgaaaaaataaatagatttacaaatttacatcaaagcagtgaagatttggtaaaaaaagttaaaatgcagagattgtgcggacaaaaaactgcagcctgtttccaaagatgcgttggtatggactcatttaatgcagtgtacagtactacttttgaaatagataaggaatataatacaaattattttgaaaatttcaagaaatttttaacttatgttcaaaagaacgatttaacagtagatggagctatgacagatccaaaaggagacagaggattgtcaccaagcaaacaggctgatccagatttatatttaagagttgtagaaagaagagaagacggtgtagttgtaagaggagcaaaggctcaccagacaggtatatgtaattctcatgaagtattggttatgccaactattgctatgagaccggatgataaagattatgcaatagctttttctgttcctacagatgcagaaggaataactatgataattggaagacagtcctgtgatactagaaaaatggaaaaagatgcggacatagatgttggtaataaagaatttggcggagtagaagcattagtagtatttgacgatgtatttgttccaaatgacaggatattcttaaatggtgaaactgaatatgcaggaatgttagtagagagatttgcaggatatcatagacaaagttatggtggatgcaaagtaggagtgggagatgtattgataggcgctgctgcagtggctgcagactataatggagctgcaaaggcatctcacataaaggataaattaatagaaatgatgcatttaaatgaaactctttacgcttgcggaattgcgtgctcagcagaaggacatgcaacaaaagctggaaattaccaaatagacttgcttcttgcaaatgtatgtaagcaaaatataacaagattcccttatgaaattgtgagattagcagaagatatagcaggaggattaatggttactatgccttctgaaaaggattataagagtccagaggttggaaaatatgtagagaagtacttggtgggagttgcatccgtacctgttgaagacagaatgaagatattaagattattagaaaatatatgtcttggaacggctgcagtaggatatagaactgaatccatgcatggagcaggttcacctcaagcacagagaataatgatatcaagacagggaaacctagcacataagaagaaacttgcaaagaagatagctagaatagaagattaaacgactcgaggaggactacggtgattaagagttttaatgaaattatcatgaaggtaaagagcaaagaaatgaaaaaagttgctgttgctgtagcacaagacgagccagtacttgaagcagtaagagatgctaagaaaaatggtattgcagatgctattcttgttggagaccatgacgaaatcgtgtcaatcgcgcttaaaataggaatggatgtaaatgattttgaaatagtaaacgagcctaacgttaagaaagctgctttaaaggcagtagagcttgtatcaactggaaaagctgatatggtaatgaagggacttgtaaatacagcaactttcttaagatctgtattaaacaaagaagttggacttagaacaggaaaaactatgtctcacgttgcagtatttgaaactgagaaatttgatagactattatttttaacagatgttgctttcaatacttatcctgaattaaaggaaaaaattgatatagtaaacaattcagttaaggttgcacatgcaataggaattgaaaatccaaaggttgctccaatttgtgcagttgaggttataaaccctaaaatgccatcaacacttgatgcagcaatgctttcaaaaatgagtgacagaggacaaattaaaggttgtgtagttgacggacctttagcacttgatatagctttatcagaagaagcagcacatcataagggagtaacaggagaagttgctggaaaagctgatatcttcttaatgccaaacatagaaacaggaaatgtaatgtataagactttaacatatacaactgattcaaaaaatggaggaatcttagttggaacttctgcaccagttgttttaacttcaagagctgacagccatgaaacaaaaatgaactctatagcacttgcagctttagttgcaggcaataaataaactggactaaggaggacgtaatgtatagattactaataatcaatcctggctcgacctcaactaaaattggtatttatgacgatgaaaaagagatatttgagaagactttaagacattcagctgaagagatagaaaaatataacactatatttgatcaatttcaattcagaaagaatgtaattttagatgcgttaaaagaagcaaacatagaagtaagttctttaaatgctgtagttggaagaggcggactcttaaagccaatagtaagtggaacttatgcagtaaatcaaaaaatgcttgaagaccttaaagtaggagttcaaggtcagcatgcgtcaaatcttggtggaattattgcaaatgaaatagcaaaagaaataaatgttccagcatacatagttgatccagttgttgtggatgagcttgatgaagtttcaagaatatcaggaatggctgacattccaagaaaaagtatattccatgcattaaatcaaaaagcagttgctagaagatatgcaaaagaagttggaaaaaaatacgaagatcttaatttaatcgtagtccacatgggtggaggtacttcagtaggtactcataaagatggtagagtaatagaagttaataatacacttgatggagaaggtccattctcaccagaaagaagtggtggagttccaataggagatcttgtaagattgtgcttcagcaacaaatatacttatgaagaagtaatgaaaaagataaacggcaaaggcggagttgttagttacttaaatactatcgattttaaggctgtagttgataaagctcttgaaggagataagaaatgtgcacttatatatgaagctttcacattccaggtagcaaaagagataggaaaatgttcaaccgttttaaaaggaaatgtagatgcaataatcttaacaggcggaattgcgtacaacgagcatgtatgtaatgccatagaggatagagtaaaattcatagcacctgtagttagatatggtggagaagatgaacttcttgcacttgcagaaggtggacttagagttttaagaggagaagaaaaagctaaggaatacaaataaactagcgaaggaggatcacatgtctattataaaaagctatgccgcaaaagaggcgggcagcgaactcgaactttacgaatatgatgccggtgaactcaggccggaagatgtcgaggtgcaggtcgactactgcggtatctgccattccgatctttccatgatcgacaacgaatggggattctctcagtatccgctggttgccgggcatgaagtgattggccgcgtggcggcgctcggcagtgcggcgcaggaaaaaggggtgaaagttggtcagcgcgtgggcgtaggctggacggcgcgcagctgtgggcattgcgatgcatgtatcagcggtaatcagattaactgcctggaaggcgccgtagccaccattctcaaccgtggcggttttgccgagaaactgcgggcagactggcagtgggtgatcccgcttccggagagcatcgatattgagtcggcaggtcctctgttatgcggcggtattacggtttttaaacctctgctgatgcaccacatcaccgcgaccagtcgcgtgggggtgatcggcatcggcggtcttgggcacattgccattaaactgttgcacgcaatgggctgtgaagtgaccgcattcagctcgaatccgtcgaaagaacaggaagtgctggcaatgggggcggataaagtcgtgaacagtcgcgatccagacgcgttaaatgcgctggcaggccagtttgatctcattatcaacaccgttaatgtcgacctcgactggcagccctactttgaagcgctggcctatggcggccatttccacaccgtcggcgcagtgatgaagccgctgccggttccggcgtttacattgattgctggcgatcgcagcatctccggctcagcaaccggtacgccctatgagctgcgcaaattgatgaagtttgccgggcgcagcaaggtctcgccgacgacagagctgttcccaatgtcgcaaatcaacgaagccatccagcacgttcgcgacggcaaagcgcgttaccgcgtggtactgcaagccgacttttgaatcgataggaggactaatgtatggttatgatggtaaagtattaagaattaatttaaaagaaagaacttgcaaatcagaaaatttagatttagataaagctaaaaagtttataggttgtaggggactaggtgttaaaactttatttgatgaaatagatcctaaaatagatgcattatcaccagaaaataaatttataattgtaacaggtcctttaactggagctccggttccaactagtggaaggtttatggtagttactaaagcaccgcttacaggaactataggaatttcaaattcgggtggaaaatggggagtagacttaaaaaaagctggttgggatatgataatagtagaggataaggctgattcaccagtttacattgaaatagtagatgataaggtagaaattaaagacgcgtcacagctttggggaaaagttacatcagaaactacaaaagagttagaaaagataactgagaataaatcaaaggtattatgtataggacctgctggtgaacgattgtctcttatggcagcagttatgaatgatgtagatagaactgcagcaagaggcggcgttggtgcagttatgggatctaaaaacttaaaagctattacagttaaaggaactggaaaaatagctttagctgataaagaaaaagtaaaaaaagtgtccgtagaaaaaattacaacattaaaaaatgatccagtagctggtcagggaatgccaacttatggtacagctatactggttaatataataaatgaaaatggagttcatcctgtaaagaattttcaagagtcttatacgaatcaagcagataaaataagtggagagactcttactgctaaccaactagtaaggaaaaatccttgttacagctgtcctataggttgtggaagatgggttagactaaaagatggcacagagtgcggaggaccagaatatgaaacactgtggtgttttggatctgactgtggttcatatgatttagatgctataaatgaagctaatatgttatgtaatgaatatggtattgatactattacttgtggtgcaacaattgctgcagctatggaactttatcaaagaggatatataaaagacgaagaaatagctggagataacctatctctcaagtggggtgatacggaatctatgattggctggataaagagaatggtatatagtgaaggctttggagcaaagatgacaaatggttcatataggctttgtgaaggttatggagcaccggagtattctatgacagttaaaaagcaggaaattccagcatatgatccaaggggaatacagggacacggtattacctatgcagttaataatagaggaggctgtcatattaagggatatatgattaaccctgaaatattaggttatcctgaaaaacttgatagatttgcattagatggtaaagcagcttatgccaaattatttcatgatttaactgctgtaattgattctttaggattgtgcatattcactacatttgggcttggaatacaggattatgtagatatgtataatgcagtagtaggagaatctacttatgatgcagattcactattagaggcaggagatagaatctggactcttgagaaattatttaatcttgcagctggaatagacagcagccaggatactctaccaaagagattgttagaagaacctattccagatggcccatcaaagggagaagttcataggctagatgttcttctgccagaatattactcagtacgaggatggagtaaagagggtatacctacagaagaaacattaaagaaattaggattagatgaatatataggtaagttctagactgacaggaggacgtatggcgaccaccagcaccaccaccaaactgagcgtgctgtgctgcagctttattagcagcccgctggtggatagcccgccgagcctggcgttttttagcccgattccgcgctttctgaccgtgcgcattgcgaccagctttcgcagcagcagccgctttccggcgaccaaaattcgcaaaagcagcctggcggcggtgatgtttccggaaaacagcgtgctgagcgatgtgtgcgcgtttggcgtgaccagcattgtggcgtttagctgcctgggcttttggggcgaaattggcaaacgcggcatttttgatcagaaactgattcgcaaactggtgcatattaacattggcctggtgtttatgctgtgctggccgctgtttagcagcggcattcagggcgcgctgtttgcgagcctggtgccgggcctgaacattgtgcgcatgctgctgctgggcctgggcgtgtatcatgatgaaggcaccattaaaagcatgagccgccatggcgatcgccgcgaactgctgaaaggcccgctgtattatgtgctgagcattaccagcgcgtgcatttattattggaaaagcagcccgattgcgattgcggtgatttgcaacctgtgcgcgggcgatggcatggcggatattgtgggccgccgctttggcaccgaaaaactgccgtataacaaaaacaaaagctttgcgggcagcattggcatggcgaccgcgggctttctggcgagcgtggcgtatatgtattattttgcgagctttggctatattgaagatagcggcggcatgattctgcgctttctggtgattagcattgcgagcgcgctggtggaaagcctgccgattagcaccgatattgatgataacctgaccattagcctgaccagcgcgctggcgggctttctgctgtaaagcatgaggaggactagaatttcagttcattattttgagctgcctcactttttggtatatcatatcatatcgaataggaatggctctgctctctgtcgcaccgcgggctcccagatggtgcgtgcacaaatcattggtcacttctagcaagggtaaggttgtccgcagaacgatctcaacttccatccgcatgtgtcggataaccactgaatccggtgaaggcgtacagagacgcatagcaaatcatcattccaacctctgggacgataatttcatacagtccctctcaacgccttatggggcaatttcgtaccatgaaagtgctcagaaacttattggagaagtaaaagagatgatcaattcaatctcggttaaagatggagaattaatcaccccctccaatgatctccttatgcggctctctatagttgatagcattgaacgtttgggaatcgataggcatttcaaaagtgaaataaaatcagctctggattatgtttacagttattggaacgaaaaaggcattgggtggggaagagatagtgttgttgccgatctcaactcaactgccttggggcttcgaactctacgactacacggatacccggtgtcttcagatgtgttacaacacttcaaagaacaaaaagggcagtttgcatgttcggccattcaaacagagggagagataagaagtgttctcaacttatttcgggcttcccaaattgcctttccgggagagaaagttatggaagaggcagaagtcttctctacaatatatttaaaagaagccatactaaagcttccggtctgcggtctttcacgagagatatcgtacgttctggaatatggttggcatataaatttgccaagattggaagcaaggaactacatcgacgtatttggagaggaccccatttatttgacgccaaatatgaagacccaaaaacttctagaacttgcaaagttggagttcaatatgtttcactctttacaacagcaagagctaaagcttctctccagatggtggaaagattcgggtttctctcaaatgaccttccctcggcatcgtcacgtggaatattacactttggcatcttgcattgatagtgaacctcaacattcttcgttcagacttggatttgccaaaatctttcatcttgccacggttcttgacgatatttacgacacctttggcacgatggatgagctagaactcttcacggcggcagttaagaggtggcatccgtctgcgacggagtggcttccagaatatatgaaaggagtatatatggtgctttacgaaaccgttaacgaaatggcaggagaagcagaaaagtctcaaggccgagacacgctcaactatggccgaaatgctttggaggcttatattgatgcttctatggaagaagcgaagtggattttcagtggttttttgccaacatttgaggagtacctggataacgggaaagttagtttcggttatggcattggcacattgcaacccattctgacgttgggcattccctttcctcatcacatcctacaagaaatagactttccttccaggctcaatgatgtggcatcttccattctccgactaaaaggcgacattcacacttaccaggctgagaggagccgtggagaaaaatcttcgtgtatatcatgttatacggaagagaatcccgagtcaacagaggaagatgcaatcaatcatatcaactccatggtcgacaaattactcaaggaactaaattgggagtatctgagacctgatagcaatgttccaatcacttccaagaaacatgcatttgacattctgagagctttctaccatctctacaaataccgagatggcttcagcgttgcgaactatgaaataaagaatttggtcatgacaaccgtcattgagcctgtgcctttataagctatcataaaaataagaagcctgcatttgcaggcttcttatttttat

SEQ ID NO: 48 - DNA, 19900 bp, artificial sequence
  plasmid SG755
tgtgagcaataaaaataagaagcctgcatttgcaggcttcttatttttatagaccggggacttatcagccaacctgtaggccagcaaaaggccaggaaccgtaaaaaggccgcgttgctggcgtttttccataggctccgcccccctgacgagcatcacaaaaatcgacgctcaagtcagaggtggcgaaacccgacaggactataaagataccaggcgtttccccctggaagctccctcgtgcgctctcctgttccgaccctgccgcttaccggatacctgtccgcctttctcccttcgggaagcgtggcgctttctcatagctcacgctgtaggtatctcagttcggtgtaggtcgttcgctccaagctgggctgtgtgcacgaaccccccgttcagcccgaccgctgcgccttatccggtaactatcgtcttgagtccaacccggtaagacacgacttatcgccactggcagcagccactggtaacaggattagcagagcgaggtatgtaggcggtgctacagagttcttgaagtggtggcctaactacggctacactagaagaacagtatttggtatctgcgctctgctgaagccagttaccttcggaaaaagagttggtagctcttgatccggcaaacaaaccaccgctggtagcggtggtttttttgtttgcaagcagcagattacgcgcagaaaaaaaggatctcaagaagatcctttgatcttttctacggggtctgacgctcagtggaacgaaaactcacgttaagggattttggtcatgagattatcaaaaaggatcttcacctagatccttttaaattaaaaatgaagttttaaatcaatctaaagtatatatgagtaaacttggtctgacagactcttcctttttcaatattattgaagcatttatcagggttattgtctcatgagcggatacatatttgaatgtatttagaaaaataaacaaataggggttccgcgcacatttccccgaaaagtgccacctgacggtcctgcaggtaatacgactcactatagggataacttaaatttatattttttactttataatatataattgattatagaatccaaattagataggaggaccaggtaaatggagaataattttattgtcaacgaaaacgagaaaagggttttaaagcagatatttaacaactccaatatcagtagaactcaaatttccaagaatttagaactgaataaagcaacaatttcgaacattcttaacaatctaaagcataaaagtttggtaaatgaagttggtgaaggaaattctactaaaagtggtggaagaaaacctatacttctcgaaattaatcaaaagtatgggtattatataagcatggatttgacatatgattctgttgagttaatgtataactattttgatgctacaattctcaaacaagatagttatgaactgaatgataagaatgtaagtagcatattacagatactcaaatctaacataaatgttagcgaaaaatacgacacattatacggtttattagggataagtatatccatacatgggattgtagatgatgaacaaaacatcattaatctaccatttcacaagaatgaaaaaagaacgtttactgatgaacttaagtctttcactaatgtaccagtggttattgaaaatgaggcaaatttaagtgcattatacgagaaaagtttatacatcaattcgaatattaacaacttgatcacattgtctatacataaaggtataggagctggcatcataatcaataagaaactctatagaggtagtaatggagaagctggagaaataggaaagactcttgttttagagtctatcaataacaatgataacaagtactataaaatagaggatatttgtagtcaagacgctttgatacaaaagattaataacagattaggagttacacttacatttaccgaactaatacagtattataacgaaggaaatagtattgtagctcatgaaatcaaacagtttatcaacaaaatgactgtcttaatacacaatcttaatactcagtttaatccagatgcaatatacatcaattgtcccttgattaatgaacttcctaatattctaaacgaaatcaaagaacaattctcttgtttttcacaaggaagtcctatacaattgcatttaaccactaatgttaaacaagctacattattaggtggaacattagcaattatgcagaaaacccttaacataaacaatatccaaatgaatattaaatagttacagcagtctgagttataaaatagatatctcggaccgtctattcttccttatttgagtgggtaccaatgaaatctttcgagctaaatcgatttctggcccactcttttttattttttagtaagcgtttacaaaaaatgaacaatgtgctatattacctctaaagttagtttgtttattaaattaaccaactaaaatgtcgggatccttactgcaataggttgctactgttttatcatgaatcatcaacgaatgtattttgcatatttcagtatctttaataaactctttgcaatttttacaagttttcatatacgcccttcttttcataaattaatttatgaattctatgtattccaaggagcttttggatccaattaggaggaatctgcgatggaaaagaaggaatttagagttttaataaagtattgttttcttaaaggaaagaatacagtagaagctaagacttggttagataatgaatttccagattctgctcctggtaaaagtacaattatagattggtatgcaaaatttaaaagaggagaaatgtcaacagaagatggagaaagatctggtagaccaaaagaagttgtaactgatgaaaatataaagaagatacataaaatgatattaaatgatagaaagatgaagttaatagaaatagcagaagctttaaaaatatctaaagaaagagttggacatataatacatcaatatttagatatgagaaaattatgtgcaaaatgggttccaagagaattaacttttgatcaaaagcaaagaagagtagatgatagtaagagatgtttacaattattaacaagaaatactccagaatttttcagaagatatgtaacaatggatgaaacttggttacatcattatacacctgaaagtaatagacaatcagcagaatggacagctactggagaaccatcacctaaaagaggaaagactcaaaagagtgctggaaaggttatggcatcagtattttgggatgctcatggtataatatttatagattatttagaaaaaggaaaaacaataaattctgattattatatggcattattagaaagattaaaagttgaaatagcagctaaaagaccacatatgaagaagaaaaaagtattatttcatcaagataatgctccttgtcataagtcattaagaactatggcaaagatacatgaattaggttttgaattattaccacatccaccttattcaccagatttagctccttctgatttctttttatttagtgatttaaagagaatgttagcaggaaagaagtttggttgtaatgaagaagttatagcagaaacagaagcttattttgaagcaaaacctaaggaatattatcaaaatggaataaagaagttagaaggtagatataatagatgtatagcattagaaggaaattatgtagaataagaattccttaattaaggagctcgataaaaataagaagcctgcatttgcaggcttcttatttttatggtcatagctgtttcctggcgcgccgccattatttttttgaacaattgacaattcatttcttattttttattaagtgatagtcaaaaggcataacagtgctgaatagaaagaaatttacagaaaagaaaattatagaatttagtatgattaattatactcatttatgaatgtttaattgaatacaaaaaaaaatacttgttatgtattcaattacgggttaaaatatagacaagttgaaaaatttaataaaaaaataagtcctcagctcttatatattaagctaccaacttagtatataagccaaaacttaaatgtgctaccaacacatcaagccgttagagaactctatctatagcaatatttcaaatgtaccgacatacaagagaaacattaactatatatattcaatttatgagattatcttaacagatataaatgtaaattgcaataagtaagatttagaagtttatagcctttgtgtattggaagcagtacgcaaaggcttttttatttgataaaaattagaagtatatttattttttcataattaatttatgaaaatgaaagggggtgagcaaagtgacagaggaaagcagtatcttatcaaataacaaggtattagcaatatcattattgactttagcagtaaacattatgacttttatagtgcttgtagctaagtagtacgaaagggggagctttaaaaagctccttggaatacatagaattcataaattaatttatgaaaagaagggcgtatatgaaaacttgtaaaaattgcaaagagtttattaaagatactgaaatatgcaaaatacattcgttgatgattcatgataaaacagtagcaacctattgcagtaaatacaatgagtcaagatgtttacataaagggaaagtccaatgtattaattgttcaaagatgaaccgatatggatggtgtgccataaaaatgagatgttttacagaggaagaacagaaaaaagaacgtacatgcattaaatattatgcaaggagctttaaaaaagctcatgtaaagaagagtaaaaagaaaaaataatttatttattaatttaatattgagagtgccgacacagtatgcactaaaaaatatatctgtggtgtagtgagccgatacaaaaggatagtcactcgcattttcataatacatcttatgttatgattatgtgtcggtgggacttcacgacgaaaacccacaataaaaaaagagttcggggtagggttaagcatagttgaggcaactaaacaatcaagctaggatatgcagtagcagaccgtaaggtcgttgtttaggtgtgttgtaatacatacgctattaagatgtaaaaatacggataccaatgaagggaaaagtataatttttggatgtagtttgtttgttcatctatgggcaaactacgtccaaagccgtttccaaatctgctaaaaagtatatcctttctaaaatcaaagtcaagtatgaaatcataaataaagtttaattttgaagttattatgatattatgtttttctattaaaataaattaagtatatagaatagtttaataatagtatatacttaatgtgataagtgtctgacagtgtcacagaaaggatgattgttatggattataagcggccggccagtgggcaagttgaaaaattcacaaaaatgtggtataatatctttgttcattagagcgataaacttgaatttgagagggaacttagatggtatttgaaaaaattgataaaaatagttggaacagaaaagagtattttgaccactactttgcaagtgtaccttgtacctacagcatgaccgttaaagtggatatcacacaaataaaggaaaagggaatgaaactatatcctgcaatgctttattatattgcaatgattgtaaaccgccattcagagtttaggacggcaatcaatcaagatggtgaattggggatatatgatgagatgataccaagctatacaatatttcacaatgatactgaaacattttccagcctttggactgagtgtaagtctgactttaaatcatttttagcagattatgaaagtgatacgcaacggtatggaaacaatcatagaatggaaggaaagccaaatgctccggaaaacatttttaatgtatctatgataccgtggtcaaccttcgatggctttaatctgaatttgcagaaaggatatgattatttgattcctatttttactatggggaaatattataaagaagataacaaaattatacttcctttggcaattcaagttcatcacgcagtatgtgacggatttcacatttgccgttttgtaaacgaattgcaggaattgataaatagttaacttcaggtttgtctgtaactaaaaacaagtatttaagcaaaaacatcgtagaaatacggtgttttttgttaccctaagtttactctatcattgatagagtgcgactctatcattgatagagtccacaggttggctgataagtccccggtctgtaccgttcgtataatgtatgctatacgaagttataggaggttataatgaacgagaaaaatataaaacacagtcaaaactttattacttcaaaacataatatagataaaataatgacaaatataagattaaatgaacatgataatatctttgaaatcggctcaggaaaagggcattttacccttgaattagtacagaggtgtaatttcgtaactgccattgaaatagaccataaattatgcaaaactacagaaaataaacttgttgatcacgataatttccaagttttaaacaaggatatattgcagtttaaatttcctaaaaaccaatcctataaaatatttggtaatataccttataacataagtacggatataatacgcaaaattgtttttgatagtatagctgatgagatttatttaatcgtggaatacgggtttgctaaaagattattaaatacaaaacgctcattggcattatttttaatggcagaagttgatatttctatattaagtatggttccaagagaatattttcatcctaaacctaaagtgaatagctcacttatcagattaaatagaaaaaaatcaagaatatcacacaaagataaacagaagtataattatttcgttatgaaatgggttaacaaagaatacaagaaaatatttacaaaaaatcaatttaacaattccttaaaacatgcaggaattgacgatttaaacaatattagctttgaacaattcttatctcttttcaatagctataaattatttaataagtaagttaagggatgcataaactgcatcccttaacttgtttttcgtgtacctattttttgtgaatcgattatgtcttttgcgcattcgtcgacaattgcatatattgataaaaataataatagtgggtataattaagttgttaggaggttagttagaatgagtagactcgataagtctaaagtgataaattccgcattagaactccttaatgaagttggaattgaaggtctaactaccaggaaattagctcagaaacttggagttgaacaaccaacattgtactggcatgtcaaaaacaaaagagcactcttagatgcattagcaatcgaaatgttagacagacatcatacacacttttgtccattagaaggtgaaagttggcaagactttttgaggaataacgcgaaaagtttcagatgtgctttactatcccatagagatggggctaaagttcacttaggaactagacctacagaaaagcagtatgagacacttgaaaatcagttggcatttctatgtcaacaaggattctcattagagaacgcattatatgctctttcagctgtaggtcatttcacgttaggttgtgttttggaagatcaagaacatcaagttgcaaaagaagagagagaaactcctactacagatagtatgccacctttattacgacaagctatagaactgtttgatcatcaaggagctgaacctgcgtttctctttggattggagttaataatttgcggactagagaaacagcttaagtgtgaaagtggatcttagttagcaccggtcagggtggtgaatgtgaaaccagtaacgttatacgatgtcgcagagtatgccggtgtctcttatcagaccgtttcccgcgtggtgaaccaggccagccacgtttctgcgaaaacgcgggaaaaagtggaagcggcgatggcggagctgaattacattcccaaccgcgtggcacaacaactggcgggcaaacagtcgttgctgattggcgttgccacctccagtctggccctgcacgcgccgtcgcaaattgtcgcggcgattaaatctcgcgccgatcaactgggtgccagcgtggtggtgtcgatggtagaacgaagcggcgtcgaagcctgtaaagcggcggtgcacaatcttctcgcgcaacgcgtcagtgggctgatcattaactatccgctggatgaccaggatgccattgctgtggaagctgcctgcactaatgttccggcgttatttcttgatgtctctgaccagacacccatcaacagtattattttctcccatgaagacggtacgcgactgggcgtggagcatctggtcgcattgggtcaccagcaaatcgcgctgttagcgggcccattaagttctgtctcggcgcgtctgcgtctggctggctggcataaatatctcactcgcaatcaaattcagccgatagcggaacgggaaggcgactggagtgccatgtccggttttcaacaaaccatgcaaatgctgaatgagggcatcgttcccactgcgatgctggttgccaacgatcagatggcgctgggcgcaatgcgcgccattaccgagtccgggctgcgcgttggtgcggacatctcggtagtgggatacgacgataccgaagacagctcatgttatatcccgccgttaaccaccatcaaacaggattttcgcctgctggggcaaaccagcgtggaccgcttgctgcaactctctcagggccaggcggtgaagggcaatcagctgttgcccgtctcactggtgaaaagaaaaaccaccctggcgcccaatacgcaaaccgcctctccccgcgcgttggccgattcattaatgcagctggcacgacaggtttcccgactggaaagcgggcagtgagcgcaacgcaattaatgtaagttagctcactcattaggcaccgggatctcgaccgatgcccttgagagccttcaacccagtcagctccttccggtgggcgcggggcatgactagcatgatcgtgctcctgtcgttgaggacccggctaggctggcggggttgccttactggttagcagaatgaatcaccgatacgcgataacttcgtataatgtatgctatacgaacggtagctcagctagcacccggaattgtgagcggataacaattccttggaattgtgagcggataacaattataattaagttgttaggaggttagaatgaaaaattgtgtcatcgtcagtgcggtacgtactgctatcggtagttttaacggttcactcgcttccaccagcgccatcgacctgggggcgacagtaattaaagccgccattgaacgtgcaaaaatcgattcacaacacgttgatgaagtgattatgggtaacgtgttacaagccgggctggggcaaaatccggcgcgtcaggcactgttaaaaagcgggctggcagaaacggtgtgcggattcacggtcaataaagtatgtggttcgggtcttaaaagtgtggcgcttgccgcccaggccattcaggcaggtcaggcgcagagcattgtggcggggggtatggaaaatatgagtttagccccctacttactcgatgcaaaagcacgctctggttatcgtcttggagacggacaggtttatgacgtaatcctgcgcgatggcctgatgtgcgccacccatggttatcatatggggattaccgccgaaaacgtggctaaagagtacggaattacccgtgaaatgcaggatgaactggcgctacattcacagcgtaaagcggcagccgcaattgagtccggtgcttttacagccgaaatcgtcccggtaaatgttgtcactcgaaagaaaaccttcgtcttcagtcaagacgaattcccgaaagcgaattcaacggctgaagcgttaggtgcattgcgcccggccttcgataaagcaggaacagtcaccgctgggaacgcgtctggtattaacgacggtgctgccgctctggtgattatggaagaatctgcggcgctggcagcaggccttacccccctggctcgcattaaaagttatgccagcggtggcgtgccccccgcattgatgggtatggggccagtacctgccacgcaaaaagcgttacaactggcggggctgcaactggcggatattgatctcattgaggctaatgaagcatttgctgcacagttccttgccgttgggaaaaacctgggctttgattctgagaaagtgaatgtcaacggcggggccatcgcgctcgggcatcctatcggtgccagtggtgctcgtattctggtcacactattacatgccatgcaggcacgcgataaaacgctggggctggcaacactgtgcattggcggcggtcagggaattgcgatggtgattgaacggttgaattaatagggaggtctgtttaatgaaaaaggtatgtgttataggtgcaggtactatgggttcaggaattgctcaggcatttgcagctaaaggatttgaagtagtattaagagatattaaagatgaatttgttgatagaggattagattttatcaataaaaatctttctaaattagttaaaaaaggaaagatagaagaagctactaaagttgaaatcttaactagaatttccggaacagttgaccttaatatggcagctgattgcgatttagttatagaagcagctgttgaaagaatggatattaaaaagcagatttttgctgacttagacaatatatgcaagccagaaacaattcttgcatcaaatacatcatcactttcaataacagaagtggcatcagcaactaaaagacctgataaggttataggtatgcatttctttaatccagctcctgttatgaagcttgtagaggtaataagaggaatagctacatcacaagaaacttttgatgcagttaaagagacatctatagcaataggaaaagatcctgtagaagtagcagaagcaccaggatttgttgtaaatagaatattaataccaatgattaatgaagcagttggtatattagcagaaggaatagcttcagtagaagacatagataaagctatgaaacttggagctaatcacccaatgggaccattagaattaggtgattttataggtcttgatatatgtcttgctataatggatgttttatactcagaaactggagattctaagtatagaccacatacattacttaagaagtatgtaagagcaggatggcttggaagaaaatcaggaaaaggtttctacgattattcaaaataagtttacaagaatccctttaggaggattagtcatggaactaaacaatgtcatccttgaaaaggaaggtaaagttgctgtagttaccattaacagacctaaagcattaaatgcgttaaatagtgatacactaaaagaaatggattatgttataggtgaaattgaaaatgatagcgaagtacttgcagtaattttaactggagcaggagaaaaatcatttgtagcaggagcagatatttctgagatgaaggaaatgaataccattgaaggtagaaaattcgggatacttggaaataaagtgtttagaagattagaacttcttgaaaagcctgtaatagcagctgttaatggttttgctttaggaggcggatgcgaaatagctatgtcttgtgatataagaatagcttcaagcaacgcaagatttggtcaaccagaagtaggtctcggaataacacctggttttggtggtacacaaagactttcaagattagttggaatgggcatggcaaagcagcttatatttactgcacaaaatataaaggcagatgaagcattaagaatcggacttgtaaataaggtagtagaacctagtgaattaatgaatacagcaaaagaaattgcaaacaaaattgtgagcaatgctccagtagctgttaagttaagcaaacaggctattaatagaggaatgcagtgtgatattgatactgctttagcatttgaatcagaagcatttggagaatgcttttcaacagaggatcaaaaggatgcaatgacagctttcatagagaaaagaaaaattgaaggcttcaaaaatagataggaggtaagtttataggaggaattccatatgatatggaaacggaaaatcaccctggaagcactgaatgctatgggtgaaggaaacatggtggggttcctggatattcgctttgaacatattggtgatgacacccttgaagcgacaatgccagtagactcgcggacaaagcagcctttcgggttgctgcatggaggagcatccgtggtactggccgaaagtatcggttccgttgccggttatttatgtaccgaaggtgagcaaaaagtggttggtctggaaatcaatgctaaccacgtccgctcggcacgagaagggcgggtgcgcggcgtatgcaaaccgttgcatctcggttcgcgtcaccaggtctggcagattgaaatcttcgatgagaaagggcgtttgtgctgttcgtcacgattgacgaccgccattttgtgaatttacacgatcgacgtgctcagctagcacccggaattgtgagcggataacaattccttggaattgtgagcggataacaattataattaagttgttaggaggttagaatgagtctgaatttccttgattttgaacagccgattgcagagctggaagcgaaaatcgattctctgactgcggttagccgtcaggatgagaaactggatattaacatcgatgaagaagtgcatcgtctgcgtgaaaaaagcgtagaactgacacgtaaaatcttcgccgatctcggtgcatggcagattgcgcaactggcacgccatccacagcgtccttataccctggattacgttcgcctggcatttgatgaatttgacgaactggctggcgaccgcgcgtatgcagacgataaagctatcgtcggtggtatcgcccgtctcgatggtcgtccggtgatgatcattggtcatcaaaaaggtcgtgaaaccaaagaaaaaattcgccgtaactttggtatgccagcgccagaaggttaccgcaaagcactgcgtctgatgcaaatggctgaacgctttaagatgccaatcatcacctttatcgacaccccgggggcttatccgggcgtgggcgcagaagagcgcggtcagtctgaagccattgcacgcaacctgcgtgaaatgtctcgccttagcgtaccgactatttgtaccgttatcggtgaaggtggttctggcggcgcgctggcgattggcgtgggcgataaagtgaatatgctgcaatacagcacctattccgttatctcgccggaaggttgtgcgtccattctgtggaagagcgctgataaagcgccgctggcggctgaagcgatgggtatcatcgctccgcgtctgaaagaactaaaactgatcgactccatcatcccagaaccgctgggtggtgctcaccgtaacccggaagcgatggcggcatcgttgaaagcgcaactgttggcggatctggccgatctcgacgtgttaagcactgaagatttaaaaaatcgtcgttatcagcgcctgatgagctacggttacgcgtaataaggaggaacccactcatggatattcgtaagattaaaaaactgatcgagctggttgaagaatcaggcatctccgaactggaaatttctgaaggcgaagagtcagtacgcattagccgtgcagctcctgccgcaagtttccctgtgatgcaacaagcttacgctgcaccaatgatgcagcagccagctcaatctaacgcagccgctccggcgaccgttccttccatggaagcgccagcagcagcggaaatcagtggtcacatcgtacgttccccgatggttggtactttctaccgcaccccaagcccggacgcaaaagcgttcatcgaagtgggtcagaaagtcaacgtgggcgataccctgtgcatcgttgaagccatgaaaatgatgaaccagatcgaagcggacaaatccggtaccgtgaaagcaattctggtcgaaagtggacaaccggtagaatttgacgagccgctggtcgtcatcgagtaacgaggcgaacatgctggataaaattgttattgccaaccgcggcgagattgcattgcgtattcttcgtgcctgtaaagaactgggcatcaagactgtcgctgtgcactccagcgcggatcgcgatctaaaacacgtattactggcagatgaaacggtctgtattggccctgctccgtcagtaaaaagttatctgaacatcccggcaatcatcagcgccgctgaaatcaccggcgcagtagcaatccatccgggttacggcttcctctccgagaacgccaactttgccgagcaggttgaacgctccggctttatcttcattggcccgaaagcagaaaccattcgcctgatgggcgacaaagtatccgcaatcgcggcgatgaaaaaagcgggcgtcccttgcgtaccgggttctgacggcccgctgggcgacgatatggataaaaaccgtgccattgctaaacgcattggttatccggtgattatcaaagcctccggcggcggcggcggtcgcggtatgcgcgtagtgcgcggcgacgctgaactggcacaatccatctccatgacccgtgcggaagcgaaagctgctttcagcaacgatatggtttacatggagaaatacctggaaaatcctcgccacgtcgagattcaggtactggctgacggtcagggcaacgctatctatctggcggaacgtgactgctccatgcaacgccgccaccagaaagtggtcgaagaagcgccagcaccgggcattaccccggaactgcgtcgctacatcggcgaacgttgcgctaaagcgtgtgttgatatcggctatcgcggtgcaggtactttcgagttcctgttcgaaaacggcgagttctatttcatcgaaatgaacacccgtattcaggtagaacacccggttacagaaatgatcaccggcgttgacctgatcaaagaacagctgcgtatcgctgccggtcaaccgctgtcgatcaagcaagaagaagttcacgttcgcggccatgcggtggaatgtcgtatcaacgccgaagatccgaacaccttcctgccaagtccgggcaaaatcacccgtttccacgcacctggcggttttggcgtacgttgggagtctcatatctacgcgggctacaccgtaccgccgtactatgactcaatgatcggtaagctgatttgctacggtgaaaaccgtgacgtggcgattgcccgcatgaagaatgcgctgcaggagctgatcatcgacggtatcaaaaccaacgttgatctgcagatccgcatcatgaatgacgagaacttccagcatggtggcactaacatccactatctggagaaaaaactcggtcttcaggaaaaataatataggaggatataacatgagctggattgaacgaattaaaagcaacattactcccacccgcaaggcgagcattcctgaaggggtgtggactaagtgtgatagctgcggtcaggttttataccgcgctgagctggaacgtaatcttgaggtctgtccgaagtgtgaccatcacatgcgtatgacagcgcgtaatcgcctgcatagcctgttagatgaaggaagccttgtggagctgggtagcgagcttgagccgaaagatgtgctgaagtttcgtgactccaagaagtataaagaccgtctggcatctgcgcagaaagaaaccggcgaaaaagatgcgctggtggtgatgaaaggcactctgtatggaatgccggttgtcgctgcggcattcgagttcgcctttatgggcggttcaatggggtctgttgtgggtgcacgtttcgtgcgtgccgttgagcaggcgctggaagataactgcccgctgatctgcttctccgcctctggtggcgcacgtatgcaggaagcactgatgtcgctgatgcagatggcgaaaacctctgcggcactggcaaaaatgcaggagcgcggcttgccgtacatctccgtgctgaccgacccgacgatgggcggtgtttctgcaagtttcgccatgctgggcgatctcaacatcgctgaaccgaaagcgttaatcggctttgccggtccgcgtgttatcgaacagaccgttcgcgaaaaactgccgcctggattccagcgcagtgaattcctgatcgagaaaggcgcgatcgacatgatcgtccgtcgtccggaaatgcgcctgaaactggcgagtattctggcgaagttgatgaatctgccagcgccgaatcctgaagcgccgcgtgaaggcgtagtggtacccccggtaccggatcaggaacctgaggcctgagactaggaggatcttaaatgaccgacgtccgattccgcattatcggtacgggtgcctacgtaccggaacggatcgtctccaacgatgaagtcggcgcgccggccggggtggacgacgactggatcacccgcaagaccggtatccggcagcgtcgctgggccgccgacgaccaggccacctcggacctggccacggccgcggggcgggcagcgctgaaagcggcgggcatcacgcccgagcagctgaccgtgatcgcggtcgccacctccacgccggaccggccgcagccgcccacggcggcctatgtccagcaccacctcggtgcgaccggcactgcggcgttcgacgtcaacgcggtctgctccggcaccgtgttcgcgctgtcctcggtggcgggcaccctcgtgtaccggggcggttacgcgctggtcatcggcgcggacctgtactcgcgcatcctcaacccggccgaccgcaagacggtcgtgctgttcggggacggcgccggcgcaatggtcctcgggccgacctcgaccggcacgggccccatcgtccggcgcgtcgccctgcacaccttcggcggcctcaccgacctgatccgtgtgcccgcgggcggcagccgccagccgctggacacggatggcctcgacgcgggactgcagtacttcgcgatggacgggcgtgaggtgcgccgcttcgtcacggagcacctgccgcagctgatcaagggcttcctgcacgaggccggggtcgacgccgccgacatcagccacttcgtgccgcatcaggccaacggtgtcatgctcgacgaggtcttcggcgagctgcatctgccgcgggcgaccatgcaccggacggtcgagacctacggcaacacgggagcggcctccatcccgatcaccatggacgcggccgtgcgcgccggttccttccggccgggcgagctggtcctgctggccgggttcggcggcggcatggccgcgagcttcgccctgatcgagtggtaggctcagctagcacccggaattgtgagcggataacaattccttggaattgtgagcggataacaattataattaagttgttaggaggttagaatgactcagcgcattgcgtatgtgaccggcggcatgggtggtatcggaaccgccatttgccagcggctggccaaggatggctttcgtgtggtggccggttgcggccccaactcgccgcgccgcgaaaagtggctggagcagcagaaggccctgggcttcgatttcattgcctcggaaggcaatgtggctgactgggactcgaccaagaccgcattcgacaaggtcaagtccgaggtcggcgaggttgatgtgctgatcaacaacgccggtatcacccgcgacgtggtgttccgcaagatgacccgcgccgactgggatgcggtgatcgacaccaacctgacctcgctgttcaacgtcaccaagcaggtgatcgacggcatggccgaccgtggctggggccgcatcgtcaacatctcgtcggtgaacgggcagaagggccagttcggccagaccaactactccaccgccaaggccggcctgcatggcttcaccatggcactggcgcaggaagtggcgaccaagggcgtgaccgtcaacacggtctctccgggctatatcgccaccgacatggtcaaggcgatccgccaggacgtgctcgacaagatcgtcgcgacgatcccggtcaagcgcctgggcctgccggaagagatcgcctcgatctgcgcctggttgtcgtcggaggagtccggtttctcgaccggcgccgacttctcgctcaacggcggcctgcatatgggctgaacaggaggcaataaatgagcgcacaatccctggaagtaggccagaaggcccgtctcagcaagcggttcggggcggcggaggtagccgccttcgccgcgctctcggaggacttcaaccccctgcacctggacccggccttcgccgccaccacggcgttcgagcggcccatagtccacggcatgctgctcgccagcctcttctccgggctgctgggccagcagttgccgggcaaggggagcatctatctgggtcaaagcctcagcttcaagctgccggtctttgtcggggacgaggtgacggccgaggtggaggtgaccgcccttcgcgaggacaagcccatcgccaccctgaccacccgcatcttcacccaaggcggcgccctcgccgtgacgggggaagccgtggtcaagctgccttaagttgaggaggtagataatgtctacaacacataacgtccctcagggcgatcttgttttacgtactttagccatgcccgccgataccaatgccaatggtgacatctttggtggttggttaatgtcacaaatggatattggcggcgctattctggcaaaagaaattgcccacggtcgcgtagtgactgtgcgggttgaaggaatgactttcttacggccggttgcggtcggcgatgtggtgtgctgctatgcacgctgtgtccagaaagggacgacatcggtcagcattaatattgaagtgtgggtgaaaaaagtagcgtctgaaccaatcgggcaacggtataaagcgacagaagcattatttaagtatgtcgcggttgatcctgaaggaaaacctcgcgccttacctgttgagtaaagcgactgacgtaggaggatatcaatgctcctatttccaagaagaactaatatagcctttttcaaaacaacaggcatttttgctaattttcctttgctaggtagaaccattacaacttcaccatctttccttacacataaactgtcaaaggaagtaaccagggcatcaacttcgcctccaagaccaaagagaattgttgtcgcaattactggtgcgactggtgttgcactgggaatcagacttctacaagtgctaaaagagttgagcgtagaaacccatttggtgatttcaaaatggggtgcagcaacaatgaaatatgaaacagattgggaaccgcatgacgtggcggccttggcaaccaagacatactctgttcgtgatgtttctgcatgcatttcgtccggatctttccagcatgatggtatgattgttgtgccctgttccatgaaatcactagctgctattagaatcggttttacagaggatttaattacaagagctgccgatgtttcgattaaagagaatcgtaagttactactggttactcgggaaacccctttatcttccatccatcttgaaaacatgttgtctttatgcagggcaggtgttataatttttcctccggtacctgcgttttatacaagacccaagagccttcatgacctattagaacaaagtgttggcaggatcctagactgctttggcatccacgctgacacttttcctcgttgggaaggaataaaaagcaagtaatactatcataaaaataagaagcctgcatttgcaggcttcttatttttat

SEQ ID NO: 49 - DNA, 25519 bp, artificial sequence
  plasmid SG779
agtgagcaataaaaataagaagcctgcatttgcaggcttcttatttttatagaccggggacttatcagccaacctgtaggccagcaaaaggccaggaaccgtaaaaaggccgcgttgctggcgtttttccataggctccgcccccctgacgagcatcacaaaaatcgacgctcaagtcagaggtggcgaaacccgacaggactataaagataccaggcgtttccccctggaagctccctcgtgcgctctcctgttccgaccctgccgcttaccggatacctgtccgcctttctcccttcgggaagcgtggcgctttctcatagctcacgctgtaggtatctcagttcggtgtaggtcgttcgctccaagctgggctgtgtgcacgaaccccccgttcagcccgaccgctgcgccttatccggtaactatcgtcttgagtccaacccggtaagacacgacttatcgccactggcagcagccactggtaacaggattagcagagcgaggtatgtaggcggtgctacagagttcttgaagtggtggcctaactacggctacactagaagaacagtatttggtatctgcgctctgctgaagccagttaccttcggaaaaagagttggtagctcttgatccggcaaacaaaccaccgctggtagcggtggtttttttgtttgcaagcagcagattacgcgcagaaaaaaaggatctcaagaagatcctttgatcttttctacggggtctgacgctcagtggaacgaaaactcacgttaagggattttggtcatgagattatcaaaaaggatcttcacctagatccttttaaattaaaaatgaagttttaaatcaatctaaagtatatatgagtaaacttggtctgacagactcttcctttttcaatattattgaagcatttatcagggttattgtctcatgagcggatacatatttgaatgtatttagaaaaataaacaaataggggttccgcgcacatttccccgaaaagtgccacctgacggtcctgcaggtaatacgactcactatagggataacttaaatttatattttttactttataatatataattgattatagaatccaaattagataggaggaccaggtaaatggagaataattttattgtcaacgaaaacgagaaaagggttttaaagcagatatttaacaactccaatatcagtagaactcaaatttccaagaatttagaactgaataaagcaacaatttcgaacattcttaacaatctaaagcataaaagtttggtaaatgaagttggtgaaggaaattctactaaaagtggtggaagaaaacctatacttctcgaaattaatcaaaagtatgggtattatataagcatggatttgacatatgattctgttgagttaatgtataactattttgatgctacaattctcaaacaagatagttatgaactgaatgataagaatgtaagtagcatattacagatactcaaatctaacataaatgttagcgaaaaatacgacacattatacggtttattagggataagtatatccatacatgggattgtagatgatgaacaaaacatcattaatctaccatttcacaagaatgaaaaaagaacgtttactgatgaacttaagtctttcactaatgtaccagtggttattgaaaatgaggcaaatttaagtgcattatacgagaaaagtttatacatcaattcgaatattaacaacttgatcacattgtctatacataaaggtataggagctggcatcataatcaataagaaactctatagaggtagtaatggagaagctggagaaataggaaagactcttgttttagagtctatcaataacaatgataacaagtactataaaatagaggatatttgtagtcaagacgctttgatacaaaagattaataacagattaggagttacacttacatttaccgaactaatacagtattataacgaaggaaatagtattgtagctcatgaaatcaaacagtttatcaacaaaatgactgtcttaatacacaatcttaatactcagtttaatccagatgcaatatacatcaattgtcccttgattaatgaacttcctaatattctaaacgaaatcaaagaacaattctcttgtttttcacaaggaagtcctatacaattgcatttaaccactaatgttaaacaagctacattattaggtggaacattagcaattatgcagaaaacccttaacataaacaatatccaaatgaatattaaatagttacagcagtctgagttataaaatagatatctcggaccgtctattcttccttatttgagtgggtaccaatgaaatctttcgagctaaatcgatttctggcccactcttttttattttttagtaagcgtttacaaaaaatgaacaatgtgctatattacctctaaagttagtttgtttattaaattaaccaactaaaatgtcgggatccttactgcaataggttgctactgttttatcatgaatcatcaacgaatgtattttgcatatttcagtatctttaataaactctttgcaatttttacaagttttcatatacgcccttcttttcataaattaatttatgaattctatgtattccaaggagcttttggatccaattaggaggaatctgcgatggaaaaaaaggaatttcgtgttttgataaaatactgttttctgaagggaaaaaatacggtggaagcaaaaacttggcttgataatgagtttccggactctgccccagggaaatcaacaataattgattggtatgcaaaattcaagcgtggtgaaatgagcacggaggacggtgaacgcagtggacgcccgaaagaggtggttaccgacgaaaacatcaaaaaaatccacaaaatgattttgaatgaccgtaaaatgaagttgatcgagatagcagaggccttaaagatatcaaaggaacgtgttggtcatatcattcatcaatatttggatatgcggaagctctgtgcaaaatgggtgccgcgcgagctcacatttgaccaaaaacaacaacgtgttgatgattctgagcggtgtttgcagctgttaactcgtaatacacccgagtttttccgtcgatatgtgacaatggatgaaacatggctccatcactacactcctgagtccaatcgacagtcggctgagtggacagcgaccggtgaaccgtctccgaagcgtggaaagactcaaaagtccgctggcaaagtaatggcctctgttttttgggatgcgcatggaataatttttatcgattatcttgagaagggaaaaaccatcaacagtgactattatatggcgttattggagcgtttgaaggtcgaaatcgcggcaaaacggccccacatgaagaagaaaaaagtgttgttccaccaagacaacgcaccgtgccacaagtcattgagaacgatggcaaaaattcatgaattgggcttcgaattgcttccccacccaccgtattctccagatctggcccccagcgactttttcttgttctcagacctcaaaaggatgctcgcagggaaaaaatttggctgcaatgaagaggtgatcgccgaaactgaggcctattttgaggcaaaaccgaaggagtactaccaaaatggtatcaaaaaattggaaggtcgttataatcgttgtatcgctcttgaagggaactatgttgaataagaattccttaattaaggagctcgataaaaataagaagcctgcatttgcaggcttcttatttttatggtcatagctgtttcctggcgcgccgccattatttttttgaacaattgacaattcatttcttattttttattaagtgatagtcaaaaggcataacagtgctgaatagaaagaaatttacagaaaagaaaattatagaatttagtatgattaattatactcatttatgaatgtttaattgaatacaaaaaaaaatacttgttatgtattcaattacgggttaaaatatagacaagttgaaaaatttaataaaaaaataagtcctcagctcttatatattaagctaccaacttagtatataagccaaaacttaaatgtgctaccaacacatcaagccgttagagaactctatctatagcaatatttcaaatgtaccgacatacaagagaaacattaactatatatattcaatttatgagattatcttaacagatataaatgtaaattgcaataagtaagatttagaagtttatagcctttgtgtattggaagcagtacgcaaaggcttttttatttgataaaaattagaagtatatttattttttcataattaatttatgaaaatgaaagggggtgagcaaagtgacagaggaaagcagtatcttatcaaataacaaggtattagcaatatcattattgactttagcagtaaacattatgacttttatagtgcttgtagctaagtagtacgaaagggggagctttaaaaagctccttggaatacatagaattcataaattaatttatgaaaagaagggcgtatatgaaaacttgtaaaaattgcaaagagtttattaaagatactgaaatatgcaaaatacattcgttgatgattcatgataaaacagtagcaacctattgcagtaaatacaatgagtcaagatgtttacataaagggaaagtccaatgtattaattgttcaaagatgaaccgatatggatggtgtgccataaaaatgagatgttttacagaggaagaacagaaaaaagaacgtacatgcattaaatattatgcaaggagctttaaaaaagctcatgtaaagaagagtaaaaagaaaaaataatttatttattaatttaatattgagagtgccgacacagtatgcactaaaaaatatatctgtggtgtagtgagccgatacaaaaggatagtcactcgcattttcataatacatcttatgttatgattatgtgtcggtgggacttcacgacgaaaacccacaataaaaaaagagttcggggtagggttaagcatagttgaggcaactaaacaatcaagctaggatatgcagtagcagaccgtaaggtcgttgtttaggtgtgttgtaatacatacgctattaagatgtaaaaatacggataccaatgaagggaaaagtataatttttggatgtagtttgtttgttcatctatgggcaaactacgtccaaagccgtttccaaatctgctaaaaagtatatcctttctaaaatcaaagtcaagtatgaaatcataaataaagtttaattttgaagttattatgatattatgtttttctattaaaataaattaagtatatagaatagtttaataatagtatatacttaatgtgataagtgtctgacagtgtcacagaaaggatgattgttatggattataagcggccggccagtgggcaagttgaaaaattcacaaaaatgtggtataatatctttgttcattagagcgataaacttgaatttgagagggaacttagatggtatttgaaaaaattgataaaaatagttggaacagaaaagagtattttgaccactactttgcaagtgtaccttgtacctacagcatgaccgttaaagtggatatcacacaaataaaggaaaagggaatgaaactatatcctgcaatgctttattatattgcaatgattgtaaaccgccattcagagtttaggacggcaatcaatcaagatggtgaattggggatatatgatgagatgataccaagctatacaatatttcacaatgatactgaaacattttccagcctttggactgagtgtaagtctgactttaaatcatttttagcagattatgaaagtgatacgcaacggtatggaaacaatcatagaatggaaggaaagccaaatgctccggaaaacatttttaatgtatctatgataccgtggtcaaccttcgatggctttaatctgaatttgcagaaaggatatgattatttgattcctatttttactatggggaaatattataaagaagataacaaaattatacttcctttggcaattcaagttcatcacgcagtatgtgacggatttcacatttgccgttttgtaaacgaattgcaggaattgataaatagttaacttcaggtttgtctgtaactaaaaacaagtatttaagcaaaaacatcgtagaaatacggtgttttttgttaccctaagtttactctatcattgatagagtgcgactctatcattgatagagtccacaggttggctgataagtccccggtctgtaccgttcgtataatgtatgctatacgaagttataggaggttataatgaacgagaaaaatataaaacacagtcaaaactttattacttcaaaacataatatagataaaataatgacaaatataagattaaatgaacatgataatatctttgaaatcggctcaggaaaagggcattttacccttgaattagtacagaggtgtaatttcgtaactgccattgaaatagaccataaattatgcaaaactacagaaaataaacttgttgatcacgataatttccaagttttaaacaaggatatattgcagtttaaatttcctaaaaaccaatcctataaaatatttggtaatataccttataacataagtacggatataatacgcaaaattgtttttgatagtatagctgatgagatttatttaatcgtggaatacgggtttgctaaaagattattaaatacaaaacgctcattggcattatttttaatggcagaagttgatatttctatattaagtatggttccaagagaatattttcatcctaaacctaaagtgaatagctcacttatcagattaaatagaaaaaaatcaagaatatcacacaaagataaacagaagtataattatttcgttatgaaatgggttaacaaagaatacaagaaaatatttacaaaaaatcaatttaacaattccttaaaacatgcaggaattgacgatttaaacaatattagctttgaacaattcttatctcttttcaatagctataaattatttaataagtaagttaagggatgcataaactgcatcccttaacttgtttttcgtgtacctattttttgtgaatcgattatgtcttttgcgcattcgtcgacaattgcatatattgataaaaataataatagtgggtataattaagttgttaggaggttagttagaatgagtagactcgataagtctaaagtgataaattccgcattagaactccttaatgaagttggaattgaaggtctaactaccaggaaattagctcagaaacttggagttgaacaaccaacattgtactggcatgtcaaaaacaaaagagcactcttagatgcattagcaatcgaaatgttagacagacatcatacacacttttgtccattagaaggtgaaagttggcaagactttttgaggaataacgcgaaaagtttcagatgtgctttactatcccatagagatggggctaaagttcacttaggaactagacctacagaaaagcagtatgagacacttgaaaatcagttggcatttctatgtcaacaaggattctcattagagaacgcattatatgctctttcagctgtaggtcatttcacgttaggttgtgttttggaagatcaagaacatcaagttgcaaaagaagagagagaaactcctactacagatagtatgccacctttattacgacaagctatagaactgtttgatcatcaaggagctgaacctgcgtttctctttggattggagttaataatttgcggactagagaaacagcttaagtgtgaaagtggatcttagttagcaccggtcagggtggtgaatgtgaaaccagtaacgttatacgatgtcgcagagtatgccggtgtctcttatcagaccgtttcccgcgtggtgaaccaggccagccacgtttctgcgaaaacgcgggaaaaagtggaagcggcgatggcggagctgaattacattcccaaccgcgtggcacaacaactggcgggcaaacagtcgttgctgattggcgttgccacctccagtctggccctgcacgcgccgtcgcaaattgtcgcggcgattaaatctcgcgccgatcaactgggtgccagcgtggtggtgtcgatggtagaacgaagcggcgtcgaagcctgtaaagcggcggtgcacaatcttctcgcgcaacgcgtcagtgggctgatcattaactatccgctggatgaccaggatgccattgctgtggaagctgcctgcactaatgttccggcgttatttcttgatgtctctgaccagacacccatcaacagtattattttctcccatgaagacggtacgcgactgggcgtggagcatctggtcgcattgggtcaccagcaaatcgcgctgttagcgggcccattaagttctgtctcggcgcgtctgcgtctggctggctggcataaatatctcactcgcaatcaaattcagccgatagcggaacgggaaggcgactggagtgccatgtccggttttcaacaaaccatgcaaatgctgaatgagggcatcgttcccactgcgatgctggttgccaacgatcagatggcgctgggcgcaatgcgcgccattaccgagtccgggctgcgcgttggtgcggacatctcggtagtgggatacgacgataccgaagacagctcatgttatatcccgccgttaaccaccatcaaacaggattttcgcctgctggggcaaaccagcgtggaccgcttgctgcaactctctcagggccaggcggtgaagggcaatcagctgttgcccgtctcactggtgaaaagaaaaaccaccctggcgcccaatacgcaaaccgcctctccccgcgcgttggccgattcattaatgcagctggcacgacaggtttcccgactggaaagcgggcagtgagcgcaacgcaattaatgtaagttagctcactcattaggcaccgggatctcgaccgatgcccttgagagccttcaacccagtcagctccttccggtgggcgcggggcatgactagcatgatcgtgctcctgtcgttgaggacccggctaggctggcggggttgccttactggttagcagaatgaatcaccgatacgcgataacttcgtataatgtatgctatacgaacggtagctcagctagcacccggaattgtgagcggataacaattccttggaattgtgagcggataacaattataattaagttgttaggaggttagaatggaaaactttatcggaagccacatgatttatacgtatgaaaacggatgggaatacgagatttatattaaaaacgaccatacaattgattatagaattcatagcggaatggttgccggacgctgggttcgagatcaggaagtgaatattgtcaaactgacagaaggcgtatataaagtgtcttggacagagccgactggcacggatgtttcattaaactttatgccaaatgaaaaacgcatgcatggcattattttcttcccgaaatgggtgcatgaacatcctgaaattacggtttgctaccaaaatgaccacattgatttgatgaaagaatcccgcgaaaaatatgaaacgtatccaaaatacgttgtacctgaatttgcggaaattacatttctgaaaaatgaaggagtcgacaacgaagaagtgatttcgaaggctccttatgagggaatgacagacgatattcgcgcgggaagattataaagtacgataggaggatcactatgtatgattttgtgattattggcggtggcatcatcggcatgtcgaccgccatgcaactgattgatgtctacccggacgcccgcattgcgttgctggaaaaagagtccggcccggcctgtcaccagacgggccacaacagcggcgtgatccatgccggggtttattacacgcccggtagcctgaaggcacagttttgcctggcgggaaaccgcgccactaaagccttttgcgatcaaaacggcattcgctatgacaactgcggcaagatgctggtcgccacctctgaactcgaaatggaacggatgcgcgcgttgtgggaacgcacggcggcaaacggtatcgagcgcgagtggttaaacgccgatgaactgcgcgagcgcgaaccgaatatcaccgggcttggcggtatttttgtgccgtccagcggcattgtcagctaccgcgaagtaacggcggcgatggcaaaaattttccaggccagaggcggcgagattatctataacgccgaagtcagcggcctcagtgagcataaaaacggcgtggtgatacgtacccgccagggcggcgaatatgaagcatcgacgctgattagctgttccgggctgatggctgaccggctggtgaaaatgctcggactcgaaccgggctttatcatctgcccgttccgtggtgagtatttccgccttgcgccggagcataaccagattgttaaccacctgatttaccccattcccgaccccgcgatgccatttttgggcgtgcatctcacccgaatgatcgatggcagcgtgaccgtcgggccaaacgcggtgctggcttttaaacgcgaaggctaccacaagcgcgacttctcgtttagcgacacgctggaaattttgggctcgtcggggattcgccgggtgctgcaaaaccatctacgctcaggactgggcgagatgaaaaactcgctgtgcaaaagcggctatctgcggctggtgcaaaagtattgtccccggctttcgttaagcgatctccagccctggcccgccggtgtgcgggcgcaggcggtatcgccggacggcaagctgattgacgattttctgtttgtcaccaccccgcgcacgatccacacctgcaatgcgccctccccggcagcgacatcagcaattcctattggtgcgtatattgtcagcaaggtacaaacgctgttggcaagccagagtaaccccggacgcacgctgcgagcggcacgtagtgtggatgccttacacgccgcatttaatcaataaaagtcgactgaggaggatcatcatgacattacaagaggcagttgcaaagtttgttgaagatggcgacgctatctccttcggcggctttacaacaaacaagaaacctatggctgctgttcgcgagattctgcgccagggcaagaaagacttcatcgcatatgcaggtcctgccggatctgactgggatatgctgattggagaggatcgcgtaaaagcgtacatcaactgctatacagctgactccggtgttaccaacgtttcccgtcgtttccgcaaaaaaatcgaggccggcgagctgatctatgaggactactcccaggatgccatcatgtacatgcttcacgctgcttccttaggtcttccattcttaccggtacgttttatgatcggttccggactggttgatgagtggggaatcacaaaggaagtgcgccagactatcgacaagctgccgaacgacaaatttgtgtacatggacaacccatttaacccaggtgagaagaccgtatgccttccagttccgcagctggatacagcaatcatccacgtacagaaggcttcacctgacggaacctgcattctgctcggcgacgagttccacgatgtagatattgctgttgcagctaagaaggttatcgttacatgtgaggagctggtaagcaacgaagtgatccgcagagatccaacccttacaaagattccgtgcttcgcagttgacgctgtctgcgttgctccttacggcgcatacccgacacagtgctacggctactatgattatgacaacagcttcctgaaggcttatggcgcagccagcaagacagaggaggatttcaaggcattcttaaaagagtacgtttacgacgtgaaagacaatgaagagttccttgagaagatcggtgtaaatcgtctccttaagttaaaagtatctgatggctttggatatgcaacagatgtaagcaaggaggattaagtagctgaggaggatctagaatgggtcaaaaatcaaaggcaatgacacttgtaaagaatttattagataatcattataaagaagtaaatatggcaaaagaaagaggggaactagttggttggtcaacatcaatatttcctcaagagattgcagaaacatttggattacatgtattatatcctgaaaatcatgcggcagcagtagcagccaagcacgaatctttgaaagtatgcgaagttgctgaaagtaaaggatattcaatagatatatgttcttatgctagagtaaatttaggatatgtagacttaaagaaaatagaaagtataaacatgcctcaaccagacttcatactttgctgtaataacatatgtaataccgttataaaatggtatgaaaacatagcaaaggaattaaatattcctatgattttaatggataccccttttaacagtgaatacgaaattactcaagaaagaattgattatttcaaaggacagcttcaagaggctataagaaaattagaagaaattacaggtaaaaaatttgaccaaaagcgttttgaagaagttatgaaaatatccacagaagcgggaaatttgtggaaagaatctatgagtctaacaaaggctattccagcaccaatgaatggatttgaaatgtttaattatatggctgttatagtttgtgctcgtgggaaaaaggaaactgtagaaatttttaagactcttatagatgaattgcaagaaagaatagataagggagaaacaagttatagaggagaacaaaaacacagaatcatgtttgaaggtataccatgttggccatatctaagttataaattaagatcattaaatgataaaggaattaatatggtaggtagtgtttatacggatgcgtgggcacttcaatatgaatcaaatgatcttgatggaatggcaaaagcatattgtagcataatgaataatgttaatttagatagacaagtagacatgagagctaaagttattagagattttaagtgtgatggagcaatatatcatatgaatcgaagctgtaagctaatggattttatgcaatatgagttagaaagaagagtagaagcaaaaactaatgtgccatatattggatttgatggggaccaagcagatccaaggaacttcacaaaagctcagtttgaaacaagagtacaaggacttgcagaagttatggaagaaagaaaaaatgtaggaggtgtaaagcatgaatagagatgactgcaggaggatctacaatggctgataagaaagaggtcaaaaagaatgcagcaaaagtgattaatggtatattagctaaatcttatgcagatgcttggaaggcaaaagaagaaggaagaccggttggttggtcaacttccgtatttccacaggaattagtagaagtttttggtttagacgtattatatccagaaaaccaagctgcaggggttgcagctaagaaagaatctttatctctttgtgaagctgcagaaagtgctggatattcaattgatttatgtgcatatgcaagaacaaattttggacttttagaaaagggtggttcagaaaacttaaatatgccaaagcctgactttatatgctgctgtaataatatttgtaatcaagttattaaatggtatgaaaacattgcaaaggaattagatataccattaataatgattgatactacatttaataatgaaaatgaggtaacagaaaatagaattaaataccttagagctcaatttgaagaggctataaaacaacttgagaaaatttctggaaagaaatttgatcccaagaagtttgaagaagttatgaaaatctccgctgaaaacggtaagctttggaaatattctatgagtttaccatcaggatctttcccatcaccaatgaatggatttgacttatttacttatatggctgttatcgtatgctatagaggtaaaatagaaactacagaagcttttaaattattgatttctgaattagaagataatattagaaataaagcaacttcctttagaggagaagagaaatatagaattatgatggaaggaattccatgctggccatatataggctataagatgagaactttagcaggctatggtgttaatatgactggaagcgtttaccctcatgcttgggcattacagtatgaagtaaacgatttagatggaatggctaaagcttacagtactatgtttaataatgttaacttagaaagaatgtgtaaatacagagtagattctttaatagatggaaattgtgatggagcattctatcatatgaatagaagctgtaaattgatgagttttatacaatatgaaatggaaagacaagtttttcaaaaaacaggcataccatatgcgggcttcgatggagaccaagcagatccaagaaactttagtaaggctcagtttgaaacaagactgcaagggctagtagaagttatggaagaaagaaagaaaggaggaaacaaataaagctgagcaggaggatctacatgaaagcattatctattaaaccagaaatctatacctttgatacatgtaaagaatttataaacaaatttaaaataggaaaagaagatttaattattacaagtgagcatacttatgtttcatatttttctaaatataaccttgataccaatgtaatctttattagaaaatacggcactggagagccaagtgatacaatggtagaagcaatttgtaaggatataaaagatattacttataaaagagtaattgctattggcggcggaagtgtccttgacgtttcaaaattgtttgcattaaagaaagtctcgccagtacttgatttatttgatcacaaattagaatttgtaaaagataaggaattgatcctaattccaacaacttgcggaacaggcagtgaagtaactaatatttctattcttgaattgaagtcaagacatacaaaattaggtcttgctatagatgaactatatgcagattttgctgttatgattccagaacttctagagaatttaccctttaaattttttgcaactagttccattgatgccttgattcattccattgaatccagtgtttcaccaaaagctacaagctatacagaaatgttttcctataaagcaatggaaatgatcttaaaaggatatcaggagatttcaaaaaatggcccagacgccaggttttccttgttagataaatttttacttgcaagcaattatgctggaattgcatttggcaatgcagggtgtggtgcagtacatgctatgagttatcctttaggtgctaattaccatgttcctcatggagaagcaaattatcaaatgttcattggagtatttaaaacctattatcgtttaaaaccacaaggtaaaattacaaaactaaataaattcttagcatccattttaaactgcaaagaaaatgaagtttacattaaaatagaagagttattaaatgtattgattcctaaaaaacaattacgtgagtatggggtaaaagaaaaagaattaaaggaatttacacaaagtgttatgactaaacaaggtcgtttaatggcaaataactatacagaattaaatgaacaaactgtatatgaaatatataaatcattatattaagctcagctagcacccggaattgtgagcggataacaattccttggaattgtgagcggataacaattataattaagttgttaggaggttagaatgttgaaggaacaattacctaaaataataactgataaagtccctggaccgaaagcagaagaagtaatacgaagaagagaagatgcagtaccctctgcaattaaatgtgtatatcctgttgtaataaaaagggcagaaggtgcggtgattgaggatgttgatgaaaattattttcttgactggactggtggtgtaggcgtactaaacgttggattttcccatccagaagtggttgaagctgtgaaagaacagtcagagaagtatttccatggtatgtttaatattgttacacacgaaggatatgttaagctggcagagaaaatgaactccattgttcctgtaaagggaaataagaaaaaaacgtttttcgcaaatagtggagcagaggctgatgaaaatgcagtaaaaatagcaaaagcttttacaaatagacccaatatagttgtattttcaggggcatttcatggacgtacagttatgaccatggcaatgacatcgaaaaaatcttatgcctatggaatgggaccttttccagatggtgtataccgtgcagaatttccgtatttatatagaagtcctgaaggaatgccagagagtgaaaccattaattattatatagaaagtattaaaaaagtatttgatcaagcttcaccaccggagtacgtagcagctatagtagtagaaccacttcagggtgaaggcggatttattccagctcccattgaatgggttaaagcagtaagaactatttgtgataaatatggtatattgcttgttgcagatgaggtacaatgtgggttctgccgtacaggtaaaatgtttgcttctgaatattggaaggaagcaggagcagctccagatataatagcaactgcaaaatctattgcagctggtatgccattaagcgcaataacagcaagggaagagattatggaggcagtaagacccggaacaattggaggaaccttctgtggaaatgcagtagcatgtgcagcagcattaaaagtgatagaaattatggaaagagatcatttggctgaccgttctatggaaataggtaagaaagtaatgaaacgctatatggaatggaaagaaaaatatgagattgttggagatgtaagaggactcggcggaatggttggaatagaatttgtaaaaaacaaagaaaagaaagatccaaatcctgaaattgtatcagcagttattcaagaagcagcccaaaatggacttatgattgagaactcgggtgtttatggaaatgttatccgctttttagcaccacttgtaattacagataagcagcttgaagcaggattagatatttttgaaaaagcaatttctaagtgtatgcaaaagtaagttgaggaggtagataatgtctacaacacataacgtccctcagggcgatcttgttttacgtactttagccatgcccgccgataccaatgccaatggtgacatctttggtggttggttaatgtcacaaatggatattggcggcgctattctggcaaaagaaattgcccacggtcgcgtagtgactgtgcgggttgaaggaatgactttcttacggccggttgcggtcggcgatgtggtgtgctgctatgcacgctgtgtccagaaagggacgacatcggtcagcattaatattgaagtgtgggtgaaaaaagtagcgtctgaaccaatcgggcaacggtataaagcgacagaagcattatttaagtatgtcgcggttgatcctgaaggaaaacctcgcgccttacctgttgagtaaaaaggagtgtatataaatggatggcaaagagtatgttcaaaaagttttaagtactgtacaaaaaagaaatttaggtgaagaagaatttcttgatgcggtaaaagaagttttaacttctttagtacctgtatttgatagaagacctgattttattaaagcaggattacttgaaagattaactgaaccagaaagagctataagttttagagtcccatgggttgatgataatggagaggttcaagtaaacagaggttttagaattcaatttaattcggctataggaccgtataagggtgggttaagatttcatccatctgtaaatcaaagtatcgtaaaatttttaggatttgagcaaatatttaagaactccttaacagggttacctatcggaggagcaaaaggcggttcagattttgatccaaaaggcaaatctgataacgaagttatgagattttgtcaagcttttatgtctgagctgtacaagtacataggttctaatagagatgtacctgcaggagatataggtgtcggtggaagagaaattggatatctatatggctattataataaacttaaaggtgtaagtgaacagggtactttgacaggcaagggactgacttatggaggaagtcttgccagaacagaagcaacaggatatggattagtttattttactgaagaaatgctaaaggatcataatttgagtttcaaagataaaaaagtagtagtttcaggttcgggaaatgtggctatttatgctattgaaaaagcaactgaacttggagctaaagttattacttgttctgattctaatggatatattttagatgaaaatggaattaatctagatgtagtaaaagaaattaaagaagttagaaggggaagaataaaagaatatctaaaaagtgtgcctactgctaagtatgtaccagattttagagaaatttggaatgttaagtgtgacatagctcttccttgtgcaactcaaggtgaaataaatgagaaatctgctaaggctcttgtagaaaatggtgttatagctgtatcagaaggagcaaatatgccgtcaactttagatgcaataaatgtatttttaagtaataagattctttttggaccttctaaggcagctaatgcaggaggagttgcatgttctgctattgaaatgtctcagaatagtataaggtattcatggacatttgaagaggtaaataataagatcaaaaatataatgattaatatttataataattctaaaaacgcggcaaaagaatatggaaatgaaggaaatatagttgtaggagccaatattgctggatttttaaaagttgctgaggctatgatggcccaaggcataatttaaaagacattcgggaggaagaatttaaatgggtttctactctatgcctagatatttccaaaatatgcctcaggtgggcaaacccctgaaaaaggcggatgccgccaatgaagaacagctgaaaaagatcgaagaagagatccatcagctgatcaaagaggctcaggaagccggcaaggcagatgctgatgtaaacaagagaggggaactgaccgctctccagagaattgaaaaactggtggaaccgggctcctggagacccctgaacaccctgttcaaccctcagggcaacaagaacggctccgtggccatcgtcaagggcctgggccgtgtaaacggcaaatggtgcgtggtcgtggcttccgacaacaagaagctggccggtgcctgggtgccaggccaggctgaatgcctgctgcgggcttccgataccgccaagaccctgcacgtgcctctggtgtatgtgctgaactgctccggcgttaagttcgacgaacaggaaaaggtataccccaaccgtcgtggcggcggtacgcctttcttccggaacgctgaactgaaccagctgggcattcccgtcatcgttggcatctacggcaccaaccctgccggcggcggctatcattccatcagccccacggtgatcattgcccatgaaaaagccaacatggctgtgggcggcgccggcattatgggcggcatgaaccccaaaggtcatgtggacctggaatatgccaacgaaatcgccgacatggtggaccgtaccggcaagaccgaacctccgggagctgtcgacatccactacaccgaaaccggtttcatgcgtgaagtctatgcttccgaagaaggcgttctggaagggatcaagaagtatgtaggcatgctgccgaaatacgatcctgaattcttccgggtggacgatccgaaagcaccggcattcccggctgacgacctgtacagcatggttcctctgaacgacaaacgggcttatgacatctacaatgtaattgcccgcctgttcgacaacagcgaactccatgaatacaaaaaaggctacggccctgaaatggtcaccggtctggccaaagtcaacggcctgctggtgggcgttgtggccaacgtccagggtctcctgatgaactaccctgaatacaaggctgcaggctccgtagggatcggcggcaaactgtaccgccagggtctggtgaaaatgaatgaattcgtcaccctgtgcgccagagaccgtctgcccatcgtctggatccaggataccaccgggatcgatgtgggcaacgatgcggaaaaggctgaactgctgggtctgggccagtccctgatctactccatccagacttcccacatccctcaattcgaaattaccctgagaaaaggcacggctgctgcccactacgtactgggcgggcctcagggcaatgacaccaacgccttctccatcggtaccgctgctacggaaatcgccgttatgaacggtgaaaccgctgccaccgccatgtactcccggagactggccaaagaccggaaagccggcaaggatctgcagccgaccatcgacaagatgaacaacctgatccaggctttctacaccaaatctcgtccgaaagtctgtgctgaactgggtctggtggatgaaatcgtggacatgaacaagatccgcgggtatgtggaagccttcacggaagctgcttatcagaatccggaaagcatctgcccgttccatcagatgattctgcctcgtgccatcagagagtttgagactttcgtaaagaaataatccttacaaggaggatctacaatgaccgacaatccttggctgattatgatgatcaacatgaccatcgtattcggtgtgctgattgtgctgggaatcctgatggtgctgatccatgctgtcgatcccaccaagaaagttcagggaaaaaaaaagcctgtagttgctaagccggcgccttccgctgctgccagcaaacggcaggaagaggaaaaagtggctgccatggcagctgtcctggccctggtccaggatgaagacgatatgattgcagctgccctgagtgctgccatcgccgaacacaaaagaaaaatggagccgatgaatctgccccatcattctttctgatgaactgttgagggacggttcattatccacaaaatcaaacaacttgaaaactgtttaggagggattctcatgagaaaattcaatgttaacgttaacggtactgtttacactgtagaagttgaagaagtcggcggcgctgtaactgcagctcctgctgctcctgccgctcctgccgctgctcctgctgccgctcctgtagctgctgctcctgctgctgctcccgctccggctcctgccgctgctcctgctgctgctcccgctccggctgccaaaccggccgctgctgctcctgccggctccgtaaccgtatccgctcccatgcccggcaagatcctgtccgttaacgtaaaacccggcgacaaagtggaagccggcgatgttctgctgatcctggaagctatgaagatgcagaacgaaatcatggctcctgaagacggcacggtttccgaagtccgcgtaaacgctggcgataccgtagccaccggcgacgtaatggttattctctaatcaacgtctccgaacataaaggaggattttagaacatggatgcttttgtggtagccctgacctctgtcatccaggacagtgggtttgtggcttttacctggggcaatgccgtaatgatgctggtcgggtgcatcctgctgtacctggccatcgtcaaaggctttgaacccctgctgctgagcccgatcgccttcgggtgcattctggccaacgtaccccggaccgggttcgaaaccgaccccggcgtcatgcagctgatcctgggcgggatcaaatacgaaatcttccctccgctgattttcatgggcgtaggggccatgaccgactttggtccgctgattgccaaccccaagaccctgctgctgggcgctgctgcccagatcggcgtgttcgtggctctgctgggggccatgctcctgggcttcaatgtgaaggaagcttccgccatcgggatcatcggtggtgctgacggcccgacttccatttacctggcttccaagatggctccccatctgctgggcgccatcgccgtggccgcttattcctacatgtccctggtgcccctgatccagccgcctgtgatgaaactgttcacctccaaggaagaacggaagatcaaaatggcccagctgcgtacggtgacccactttgaaaaagtggtgttccccattgtcaccaccattttcatttccctgctgctgccttccgtatgctctttgatcgggatgctgatgctggggaacctgttcaccgaatccggctgtatggaccgtctgtctgacacggcacagaatgccctgatgaacagcgtgaccatcatgctggccaccggtaccggcctgaccatgaaggccgaaagcttcctgaccttgcagaccatcgaaatcatctgcctgggtctggttgcctttatcggcggcaccgccggcggtgtgctgttcggcaagctgatgagcaagctggacggcggcaagaccaacccgctgattggttctgccggtgtatccgcagtgcctatggctgcccgtgtgtcccaggttgtgggacagcaggctgaccctggcaacttcctgctgatgcacgccatgggccccaatgtggccggggttatcggtacggctgttgcagctggtaccatgctggccatggtgggcggcaaataaagtcaaggaggagcataatggagtgggaagagatatataaagagaaactggtaactgcagaaaaagctgtttcaaaaatagaaaaccatagcagggtagtttttgcacatgcagtaggagaacccgtagatttagtaaatgcactagttaaaaataaggataattatataggactagaaatagttcacatggtagctatgggcaaaggtgaatatacaaaagagggtatgcaaagacattttagacataatgctttatttgtaggcggatgtactagagatgcagtaaattcaggaagagcagattatacaccttgttttttctatgaagtgccaagtttgtttaaagaaaaacgtttgcctgtagatgtagcacttattcaggtaagtgagccagataaatatggctactgcagttttggagtttccaatgactataccaagccagcagcagaaagtgctaagcttgtaattgcagaagtgaataaaaacatgccaagaactcttggagattcttttatacatgtatcagatattgattatatagtggaagcttcacacccattgttagaattgcagcctcctaaattgggagatgtagaaaaagccataggagaaaactgtgcatctttaattgaagatggagctactcttcagcttggaataggtgctataccagatgcggtacttttattcttaaagaacaaaaagaatttaggaatacattctgagatgatatcagatggtgtgatggaactggtgaaggcaggggttatcaataacaagaaaaagaccctccatccaggcaaaatagttgtaacatttttaatgggaacaaaaaaattatatgattttgtaaacaataatccaatggtagaaacttattctgtagattatgtaaataatccactggtaattatgaaaaatgacaatatggtttcaataaattcttgtgttcaagtagacttaatgggacaagtatgttctgaaagtataggattgaaacagataagtggagtgggaggccaggtagattttattagaggagctaatctatcaaagggtggaaaggctattatagctataccttccacagctggaaaaggaaaagtttcaagaataactccacttctagatactggtgctgcagttacaacttctagaaatgaagtagattatgtagttactgaatatggtgttgctcatcttaagggcaaaactttaagaaatagggcaagagctctaataaatatcgctcatccaaaattcagagaatcattaatgaatgaatttaaaaagagattttagagattaaggaggactacgaatgtctttaatgactggggaagaatatgtagaaagtttacgtaaattaaaattaaacgtttattatctgggagagaaaatagataatccagtggataaccctgtacttcgtccatctttaaattctgttaagatgacttatgacttggcccaagaagcagaatatgaggatttaatgacaacaacatcaaatataacaggtgaaaaaataaatagatttacaaatttacatcaaagcagtgaagatttggtaaaaaaagttaaaatgcagagattgtgcggacaaaaaactgcagcctgtttccaaagatgcgttggtatggactcatttaatgcagtgtacagtactacttttgaaatagataaggaatataatacaaattattttgaaaatttcaagaaatttttaacttatgttcaaaagaacgatttaacagtagatggagctatgacagatccaaaaggagacagaggattgtcaccaagcaaacaggctgatccagatttatatttaagagttgtagaaagaagagaagacggtgtagttgtaagaggagcaaaggctcaccagacaggtatatgtaattctcatgaagtattggttatgccaactattgctatgagaccggatgataaagattatgcaatagctttttctgttcctacagatgcagaaggaataactatgataattggaagacagtcctgtgatactagaaaaatggaaaaagatgcggacatagatgttggtaataaagaatttggcggagtagaagcattagtagtatttgacgatgtatttgttccaaatgacaggatattcttaaatggtgaaactgaatatgcaggaatgttagtagagagatttgcaggatatcatagacaaagttatggtggatgcaaagtaggagtgggagatgtattgataggcgctgctgcagtggctgcagactataatggagctgcaaaggcatctcacataaaggataaattaatagaaatgatgcatttaaatgaaactctttacgcttgcggaattgcgtgctcagcagaaggacatgcaacaaaagctggaaattaccaaatagacttgcttcttgcaaatgtatgtaagcaaaatataacaagattcccttatgaaattgtgagattagcagaagatatagcaggaggattaatggttactatgccttctgaaaaggattataagagtccagaggttggaaaatatgtagagaagtacttggtgggagttgcatccgtacctgttgaagacagaatgaagatattaagattattagaaaatatatgtcttggaacggctgcagtaggatatagaactgaatccatgcatggagcaggttcacctcaagcacagagaataatgatatcaagacagggaaacctagcacataagaagaaacttgcaaagaagatagctagaatagaagattaagctatcataaaaataagaagcctgcatttgcaggcttcttatttttat

SEQ ID NO: 50 - DNA, 30956 bp, artificial sequence
  plasmid SG839
agtgagcaataaaaataagaagcctgcatttgcaggcttcttatttttatagaccggggacttatcagccaacctgtaggccagcaaaaggccaggaaccgtaaaaaggccgcgttgctggcgtttttccataggctccgcccccctgacgagcatcacaaaaatcgacgctcaagtcagaggtggcgaaacccgacaggactataaagataccaggcgtttccccctggaagctccctcgtgcgctctcctgttccgaccctgccgcttaccggatacctgtccgcctttctcccttcgggaagcgtggcgctttctcatagctcacgctgtaggtatctcagttcggtgtaggtcgttcgctccaagctgggctgtgtgcacgaaccccccgttcagcccgaccgctgcgccttatccggtaactatcgtcttgagtccaacccggtaagacacgacttatcgccactggcagcagccactggtaacaggattagcagagcgaggtatgtaggcggtgctacagagttcttgaagtggtggcctaactacggctacactagaagaacagtatttggtatctgcgctctgctgaagccagttaccttcggaaaaagagttggtagctcttgatccggcaaacaaaccaccgctggtagcggtggtttttttgtttgcaagcagcagattacgcgcagaaaaaaaggatctcaagaagatcctttgatcttttctacggggtctgacgctcagtggaacgaaaactcacgttaagggattttggtcatgagattatcaaaaaggatcttcacctagatccttttaaattaaaaatgaagttttaaatcaatctaaagtatatatgagtaaacttggtctgacagactcttcctttttcaatattattgaagcatttatcagggttattgtctcatgagcggatacatatttgaatgtatttagaaaaataaacaaataggggttccgcgcacatttccccgaaaagtgccacctgacggtcctgcaggtaatacgactcactatagggataacttaaatttatattttttactttataatatataattgattatagaatccaaattagataggaggaccaggtaaatggagaataattttattgtcaacgaaaacgagaaaagggttttaaagcagatatttaacaactccaatatcagtagaactcaaatttccaagaatttagaactgaataaagcaacaatttcgaacattcttaacaatctaaagcataaaagtttggtaaatgaagttggtgaaggaaattctactaaaagtggtggaagaaaacctatacttctcgaaattaatcaaaagtatgggtattatataagcatggatttgacatatgattctgttgagttaatgtataactattttgatgctacaattctcaaacaagatagttatgaactgaatgataagaatgtaagtagcatattacagatactcaaatctaacataaatgttagcgaaaaatacgacacattatacggtttattagggataagtatatccatacatgggattgtagatgatgaacaaaacatcattaatctaccatttcacaagaatgaaaaaagaacgtttactgatgaacttaagtctttcactaatgtaccagtggttattgaaaatgaggcaaatttaagtgcattatacgagaaaagtttatacatcaattcgaatattaacaacttgatcacattgtctatacataaaggtataggagctggcatcataatcaataagaaactctatagaggtagtaatggagaagctggagaaataggaaagactcttgttttagagtctatcaataacaatgataacaagtactataaaatagaggatatttgtagtcaagacgctttgatacaaaagattaataacagattaggagttacacttacatttaccgaactaatacagtattataacgaaggaaatagtattgtagctcatgaaatcaaacagtttatcaacaaaatgactgtcttaatacacaatcttaatactcagtttaatccagatgcaatatacatcaattgtcccttgattaatgaacttcctaatattctaaacgaaatcaaagaacaattctcttgtttttcacaaggaagtcctatacaattgcatttaaccactaatgttaaacaagctacattattaggtggaacattagcaattatgcagaaaacccttaacataaacaatatccaaatgaatattaaatagttacagcagtctgagttataaaatagatatctcggaccgtctattcttccttatttgagtgggtaccaatgaaatctttcgagctaaatcgatttctggcccactcttttttattttttagtaagcgtttacaaaaaatgaacaatgtgctatattacctctaaagttagtttgtttattaaattaaccaactaaaatgtcgggatccttactgcaataggttgctactgttttatcatgaatcatcaacgaatgtattttgcatatttcagtatctttaataaactctttgcaatttttacaagttttcatatacgcccttcttttcataaattaatttatgaattctatgtattccaaggagcttttggatccaattaggaggaatctgcgatggaaaaaaaggaatttcgtgttttgataaaatactgttttctgaagggaaaaaatacggtggaagcaaaaacttggcttgataatgagtttccggactctgccccagggaaatcaacaataattgattggtatgcaaaattcaagcgtggtgaaatgagcacggaggacggtgaacgcagtggacgcccgaaagaggtggttaccgacgaaaacatcaaaaaaatccacaaaatgattttgaatgaccgtaaaatgaagttgatcgagatagcagaggccttaaagatatcaaaggaacgtgttggtcatatcattcatcaatatttggatatgcggaagctctgtgcaaaatgggtgccgcgcgagctcacatttgaccaaaaacaacaacgtgttgatgattctgagcggtgtttgcagctgttaactcgtaatacacccgagtttttccgtcgatatgtgacaatggatgaaacatggctccatcactacactcctgagtccaatcgacagtcggctgagtggacagcgaccggtgaaccgtctccgaagcgtggaaagactcaaaagtccgctggcaaagtaatggcctctgttttttgggatgcgcatggaataatttttatcgattatcttgagaagggaaaaaccatcaacagtgactattatatggcgttattggagcgtttgaaggtcgaaatcgcggcaaaacggccccacatgaagaagaaaaaagtgttgttccaccaagacaacgcaccgtgccacaagtcattgagaacgatggcaaaaattcatgaattgggcttcgaattgcttccccacccaccgtattctccagatctggcccccagcgactttttcttgttctcagacctcaaaaggatgctcgcagggaaaaaatttggctgcaatgaagaggtgatcgccgaaactgaggcctattttgaggcaaaaccgaaggagtactaccaaaatggtatcaaaaaattggaaggtcgttataatcgttgtatcgctcttgaagggaactatgttgaataagaattccttaattaaggagctcgataaaaataagaagcctgcatttgcaggcttcttatttttatggtcatagctgtttcctggcgcgccgccattatttttttgaacaattgacaattcatttcttattttttattaagtgatagtcaaaaggcataacagtgctgaatagaaagaaatttacagaaaagaaaattatagaatttagtatgattaattatactcatttatgaatgtttaattgaatacaaaaaaaaatacttgttatgtattcaattacgggttaaaatatagacaagttgaaaaatttaataaaaaaataagtcctcagctcttatatattaagctaccaacttagtatataagccaaaacttaaatgtgctaccaacacatcaagccgttagagaactctatctatagcaatatttcaaatgtaccgacatacaagagaaacattaactatatatattcaatttatgagattatcttaacagatataaatgtaaattgcaataagtaagatttagaagtttatagcctttgtgtattggaagcagtacgcaaaggcttttttatttgataaaaattagaagtatatttattttttcataattaatttatgaaaatgaaagggggtgagcaaagtgacagaggaaagcagtatcttatcaaataacaaggtattagcaatatcattattgactttagcagtaaacattatgacttttatagtgcttgtagctaagtagtacgaaagggggagctttaaaaagctccttggaatacatagaattcataaattaatttatgaaaagaagggcgtatatgaaaacttgtaaaaattgcaaagagtttattaaagatactgaaatatgcaaaatacattcgttgatgattcatgataaaacagtagcaacctattgcagtaaatacaatgagtcaagatgtttacataaagggaaagtccaatgtattaattgttcaaagatgaaccgatatggatggtgtgccataaaaatgagatgttttacagaggaagaacagaaaaaagaacgtacatgcattaaatattatgcaaggagctttaaaaaagctcatgtaaagaagagtaaaaagaaaaaataatttatttattaatttaatattgagagtgccgacacagtatgcactaaaaaatatatctgtggtgtagtgagccgatacaaaaggatagtcactcgcattttcataatacatcttatgttatgattatgtgtcggtgggacttcacgacgaaaacccacaataaaaaaagagttcggggtagggttaagcatagttgaggcaactaaacaatcaagctaggatatgcagtagcagaccgtaaggtcgttgtttaggtgtgttgtaatacatacgctattaagatgtaaaaatacggataccaatgaagggaaaagtataatttttggatgtagtttgtttgttcatctatgggcaaactacgtccaaagccgtttccaaatctgctaaaaagtatatcctttctaaaatcaaagtcaagtatgaaatcataaataaagtttaattttgaagttattatgatattatgtttttctattaaaataaattaagtatatagaatagtttaataatagtatatacttaatgtgataagtgtctgacagtgtcacagaaaggatgattgttatggattataagcggccggccagtgggcaagttgaaaaattcacaaaaatgtggtataatatctttgttcattagagcgataaacttgaatttgagagggaacttagatggtatttgaaaaaattgataaaaatagttggaacagaaaagagtattttgaccactactttgcaagtgtaccttgtacctacagcatgaccgttaaagtggatatcacacaaataaaggaaaagggaatgaaactatatcctgcaatgctttattatattgcaatgattgtaaaccgccattcagagtttaggacggcaatcaatcaagatggtgaattggggatatatgatgagatgataccaagctatacaatatttcacaatgatactgaaacattttccagcctttggactgagtgtaagtctgactttaaatcatttttagcagattatgaaagtgatacgcaacggtatggaaacaatcatagaatggaaggaaagccaaatgctccggaaaacatttttaatgtatctatgataccgtggtcaaccttcgatggctttaatctgaatttgcagaaaggatatgattatttgattcctatttttactatggggaaatattataaagaagataacaaaattatacttcctttggcaattcaagttcatcacgcagtatgtgacggatttcacatttgccgttttgtaaacgaattgcaggaattgataaatagttaacttcaggtttgtctgtaactaaaaacaagtatttaagcaaaaacatcgtagaaatacggtgttttttgttaccctaagtttactctatcattgatagagtgcgactctatcattgatagagtccacaggttggctgataagtccccggtctgtaccgttcgtataatgtatgctatacgaagttataggaggttataatgaacgagaaaaatataaaacacagtcaaaactttattacttcaaaacataatatagataaaataatgacaaatataagattaaatgaacatgataatatctttgaaatcggctcaggaaaagggcattttacccttgaattagtacagaggtgtaatttcgtaactgccattgaaatagaccataaattatgcaaaactacagaaaataaacttgttgatcacgataatttccaagttttaaacaaggatatattgcagtttaaatttcctaaaaaccaatcctataaaatatttggtaatataccttataacataagtacggatataatacgcaaaattgtttttgatagtatagctgatgagatttatttaatcgtggaatacgggtttgctaaaagattattaaatacaaaacgctcattggcattatttttaatggcagaagttgatatttctatattaagtatggttccaagagaatattttcatcctaaacctaaagtgaatagctcacttatcagattaaatagaaaaaaatcaagaatatcacacaaagataaacagaagtataattatttcgttatgaaatgggttaacaaagaatacaagaaaatatttacaaaaaatcaatttaacaattccttaaaacatgcaggaattgacgatttaaacaatattagctttgaacaattcttatctcttttcaatagctataaattatttaataagtaagttaagggatgcataaactgcatcccttaacttgtttttcgtgtacctattttttgtgaatcgattatgtcttttgcgcattcgtcgacaattgcatatattgataaaaataataatagtgggtataattaagttgttaggaggttagttagaatgagtagactcgataagtctaaagtgataaattccgcattagaactccttaatgaagttggaattgaaggtctaactaccaggaaattagctcagaaacttggagttgaacaaccaacattgtactggcatgtcaaaaacaaaagagcactcttagatgcattagcaatcgaaatgttagacagacatcatacacacttttgtccattagaaggtgaaagttggcaagactttttgaggaataacgcgaaaagtttcagatgtgctttactatcccatagagatggggctaaagttcacttaggaactagacctacagaaaagcagtatgagacacttgaaaatcagttggcatttctatgtcaacaaggattctcattagagaacgcattatatgctctttcagctgtaggtcatttcacgttaggttgtgttttggaagatcaagaacatcaagttgcaaaagaagagagagaaactcctactacagatagtatgccacctttattacgacaagctatagaactgtttgatcatcaaggagctgaacctgcgtttctctttggattggagttaataatttgcggactagagaaacagcttaagtgtgaaagtggatcttagttagcaccggtcagggtggtgaatgtgaaaccagtaacgttatacgatgtcgcagagtatgccggtgtctcttatcagaccgtttcccgcgtggtgaaccaggccagccacgtttctgcgaaaacgcgggaaaaagtggaagcggcgatggcggagctgaattacattcccaaccgcgtggcacaacaactggcgggcaaacagtcgttgctgattggcgttgccacctccagtctggccctgcacgcgccgtcgcaaattgtcgcggcgattaaatctcgcgccgatcaactgggtgccagcgtggtggtgtcgatggtagaacgaagcggcgtcgaagcctgtaaagcggcggtgcacaatcttctcgcgcaacgcgtcagtgggctgatcattaactatccgctggatgaccaggatgccattgctgtggaagctgcctgcactaatgttccggcgttatttcttgatgtctctgaccagacacccatcaacagtattattttctcccatgaagacggtacgcgactgggcgtggagcatctggtcgcattgggtcaccagcaaatcgcgctgttagcgggcccattaagttctgtctcggcgcgtctgcgtctggctggctggcataaatatctcactcgcaatcaaattcagccgatagcggaacgggaaggcgactggagtgccatgtccggttttcaacaaaccatgcaaatgctgaatgagggcatcgttcccactgcgatgctggttgccaacgatcagatggcgctgggcgcaatgcgcgccattaccgagtccgggctgcgcgttggtgcggacatctcggtagtgggatacgacgataccgaagacagctcatgttatatcccgccgttaaccaccatcaaacaggattttcgcctgctggggcaaaccagcgtggaccgcttgctgcaactctctcagggccaggcggtgaagggcaatcagctgttgcccgtctcactggtgaaaagaaaaaccaccctggcgcccaatacgcaaaccgcctctccccgcgcgttggccgattcattaatgcagctggcacgacaggtttcccgactggaaagcgggcagtgagcgcaacgcaattaatgtaagttagctcactcattaggcaccgggatctcgaccgatgcccttgagagccttcaacccagtcagctccttccggtgggcgcggggcatgactagcatgatcgtgctcctgtcgttgaggacccggctaggctggcggggttgccttactggttagcagaatgaatcaccgatacgcgataacttcgtataatgtatgctatacgaacggtagctcagctagcacccggaattgtgagcggataacaattccttggaattgtgagcggataacaattataattaagttgttaggaggttagaatgagtctgaatttccttgattttgaacagccgattgcagagctggaagcgaaaatcgattctctgactgcggttagccgtcaggatgagaaactggatattaacatcgatgaagaagtgcatcgtctgcgtgaaaaaagcgtagaactgacacgtaaaatcttcgccgatctcggtgcatggcagattgcgcaactggcacgccatccacagcgtccttataccctggattacgttcgcctggcatttgatgaatttgacgaactggctggcgaccgcgcgtatgcagacgataaagctatcgtcggtggtatcgcccgtctcgatggtcgtccggtgatgatcattggtcatcaaaaaggtcgtgaaaccaaagaaaaaattcgccgtaactttggtatgccagcgccagaaggttaccgcaaagcactgcgtctgatgcaaatggctgaacgctttaagatgccaatcatcacctttatcgacaccccgggggcttatccgggcgtgggcgcagaagagcgcggtcagtctgaagccattgcacgcaacctgcgtgaaatgtctcgccttagcgtaccgactatttgtaccgttatcggtgaaggtggttctggcggcgcgctggcgattggcgtgggcgataaagtgaatatgctgcaatacagcacctattccgttatctcgccggaaggttgtgcgtccattctgtggaagagcgctgataaagcgccgctggcggctgaagcgatgggtatcatcgctccgcgtctgaaagaactaaaactgatcgactccatcatcccagaaccgctgggtggtgctcaccgtaacccggaagcgatggcggcatcgttgaaagcgcaactgttggcggatctggccgatctcgacgtgttaagcactgaagatttaaaaaatcgtcgttatcagcgcctgatgagctacggttacgcgtaataaggaggaacccactcatggatattcgtaagattaaaaaactgatcgagctggttgaagaatcaggcatctccgaactggaaatttctgaaggcgaagagtcagtacgcattagccgtgcagctcctgccgcaagtttccctgtgatgcaacaagcttacgctgcaccaatgatgcagcagccagctcaatctaacgcagccgctccggcgaccgttccttccatggaagcgccagcagcagcggaaatcagtggtcacatcgtacgttccccgatggttggtactttctaccgcaccccaagcccggacgcaaaagcgttcatcgaagtgggtcagaaagtcaacgtgggcgataccctgtgcatcgttgaagccatgaaaatgatgaaccagatcgaagcggacaaatccggtaccgtgaaagcaattctggtcgaaagtggacaaccggtagaatttgacgagccgctggtcgtcatcgagtaacgaggcgaacatgctggataaaattgttattgccaaccgcggcgagattgcattgcgtattcttcgtgcctgtaaagaactgggcatcaagactgtcgctgtgcactccagcgcggatcgcgatctaaaacacgtattactggcagatgaaacggtctgtattggccctgctccgtcagtaaaaagttatctgaacatcccggcaatcatcagcgccgctgaaatcaccggcgcagtagcaatccatccgggttacggcttcctctccgagaacgccaactttgccgagcaggttgaacgctccggctttatcttcattggcccgaaagcagaaaccattcgcctgatgggcgacaaagtatccgcaatcgcggcgatgaaaaaagcgggcgtcccttgcgtaccgggttctgacggcccgctgggcgacgatatggataaaaaccgtgccattgctaaacgcattggttatccggtgattatcaaagcctccggcggcggcggcggtcgcggtatgcgcgtagtgcgcggcgacgctgaactggcacaatccatctccatgacccgtgcggaagcgaaagctgctttcagcaacgatatggtttacatggagaaatacctggaaaatcctcgccacgtcgagattcaggtactggctgacggtcagggcaacgctatctatctggcggaacgtgactgctccatgcaacgccgccaccagaaagtggtcgaagaagcgccagcaccgggcattaccccggaactgcgtcgctacatcggcgaacgttgcgctaaagcgtgtgttgatatcggctatcgcggtgcaggtactttcgagttcctgttcgaaaacggcgagttctatttcatcgaaatgaacacccgtattcaggtagaacacccggttacagaaatgatcaccggcgttgacctgatcaaagaacagctgcgtatcgctgccggtcaaccgctgtcgatcaagcaagaagaagttcacgttcgcggccatgcggtggaatgtcgtatcaacgccgaagatccgaacaccttcctgccaagtccgggcaaaatcacccgtttccacgcacctggcggttttggcgtacgttgggagtctcatatctacgcgggctacaccgtaccgccgtactatgactcaatgatcggtaagctgatttgctacggtgaaaaccgtgacgtggcgattgcccgcatgaagaatgcgctgcaggagctgatcatcgacggtatcaaaaccaacgttgatctgcagatccgcatcatgaatgacgagaacttccagcatggtggcactaacatccactatctggagaaaaaactcggtcttcaggaaaaataatataggaggatataacatgagctggattgaacgaattaaaagcaacattactcccacccgcaaggcgagcattcctgaaggggtgtggactaagtgtgatagctgcggtcaggttttataccgcgctgagctggaacgtaatcttgaggtctgtccgaagtgtgaccatcacatgcgtatgacagcgcgtaatcgcctgcatagcctgttagatgaaggaagccttgtggagctgggtagcgagcttgagccgaaagatgtgctgaagtttcgtgactccaagaagtataaagaccgtctggcatctgcgcagaaagaaaccggcgaaaaagatgcgctggtggtgatgaaaggcactctgtatggaatgccggttgtcgctgcggcattcgagttcgcctttatgggcggttcaatggggtctgttgtgggtgcacgtttcgtgcgtgccgttgagcaggcgctggaagataactgcccgctgatctgcttctccgcctctggtggcgcacgtatgcaggaagcactgatgtcgctgatgcagatggcgaaaacctctgcggcactggcaaaaatgcaggagcgcggcttgccgtacatctccgtgctgaccgacccgacgatgggcggtgtttctgcaagtttcgccatgctgggcgatctcaacatcgctgaaccgaaagcgttaatcggctttgccggtccgcgtgttatcgaacagaccgttcgcgaaaaactgccgcctggattccagcgcagtgaattcctgatcgagaaaggcgcgatcgacatgatcgtccgtcgtccggaaatgcgcctgaaactggcgagtattctggcgaagttgatgaatctgccagcgccgaatcctgaagcgccgcgtgaaggcgtagtggtacccccggtaccggatcaggaacctgaggcctgagactaggaggatcttaaatgaccgacgtccgattccgcattatcggtacgggtgcctacgtaccggaacggatcgtctccaacgatgaagtcggcgcgccggccggggtggacgacgactggatcacccgcaagaccggtatccggcagcgtcgctgggccgccgacgaccaggccacctcggacctggccacggccgcggggcgggcagcgctgaaagcggcgggcatcacgcccgagcagctgaccgtgatcgcggtcgccacctccacgccggaccggccgcagccgcccacggcggcctatgtccagcaccacctcggtgcgaccggcactgcggcgttcgacgtcaacgcggtctgctccggcaccgtgttcgcgctgtcctcggtggcgggcaccctcgtgtaccggggcggttacgcgctggtcatcggcgcggacctgtactcgcgcatcctcaacccggccgaccgcaagacggtcgtgctgttcggggacggcgccggcgcaatggtcctcgggccgacctcgaccggcacgggccccatcgtccggcgcgtcgccctgcacaccttcggcggcctcaccgacctgatccgtgtgcccgcgggcggcagccgccagccgctggacacggatggcctcgacgcgggactgcagtacttcgcgatggacgggcgtgaggtgcgccgcttcgtcacggagcacctgccgcagctgatcaagggcttcctgcacgaggccggggtcgacgccgccgacatcagccacttcgtgccgcatcaggccaacggtgtcatgctcgacgaggtcttcggcgagctgcatctgccgcgggcgaccatgcaccggacggtcgagacctacggcaacacgggagcggcctccatcccgatcaccatggacgcggccgtgcgcgccggttccttccggccgggcgagctggtcctgctggccgggttcggcggcggcatggccgcgagcttcgccctgatcgagtggtagtagggaggtctgtttaatgaaaaaggtatgtgttataggtgcaggtactatgggttcaggaattgctcaggcatttgcagctaaaggatttgaagtagtattaagagatattaaagatgaatttgttgatagaggattagattttatcaataaaaatctttctaaattagttaaaaaaggaaagatagaagaagctactaaagttgaaatcttaactagaatttccggaacagttgaccttaatatggcagctgattgcgatttagttatagaagcagctgttgaaagaatggatattaaaaagcagatttttgctgacttagacaatatatgcaagccagaaacaattcttgcatcaaatacatcatcactttcaataacagaagtggcatcagcaactaaaagacctgataaggttataggtatgcatttctttaatccagctcctgttatgaagcttgtagaggtaataagaggaatagctacatcacaagaaacttttgatgcagttaaagagacatctatagcaataggaaaagatcctgtagaagtagcagaagcaccaggatttgttgtaaatagaatattaataccaatgattaatgaagcagttggtatattagcagaaggaatagcttcagtagaagacatagataaagctatgaaacttggagctaatcacccaatgggaccattagaattaggtgattttataggtcttgatatatgtcttgctataatggatgttttatactcagaaactggagattctaagtatagaccacatacattacttaagaagtatgtaagagcaggatggcttggaagaaaatcaggaaaaggtttctacgattattcaaaataagtttacaagaatccctttaggaggattagtcatggaactaaacaatgtcatccttgaaaaggaaggtaaagttgctgtagttaccattaacagacctaaagcattaaatgcgttaaatagtgatacactaaaagaaatggattatgttataggtgaaattgaaaatgatagcgaagtacttgcagtaattttaactggagcaggagaaaaatcatttgtagcaggagcagatatttctgagatgaaggaaatgaataccattgaaggtagaaaattcgggatacttggaaataaagtgtttagaagattagaacttcttgaaaagcctgtaatagcagctgttaatggttttgctttaggaggcggatgcgaaatagctatgtcttgtgatataagaatagcttcaagcaacgcaagatttggtcaaccagaagtaggtctcggaataacacctggttttggtggtacacaaagactttcaagattagttggaatgggcatggcaaagcagcttatatttactgcacaaaatataaaggcagatgaagcattaagaatcggacttgtaaataaggtagtagaacctagtgaattaatgaatacagcaaaagaaattgcaaacaaaattgtgagcaatgctccagtagctgttaagttaagcaaacaggctattaatagaggaatgcagtgtgatattgatactgctttagcatttgaatcagaagcatttggagaatgcttttcaacagaggatcaaaaggatgcaatgacagctttcatagagaaaagaaaaattgaaggcttcaaaaatagataggctcagctagcacccggaattgtgagcggataacaattccttggaattgtgagcggataacaattataattaagttgttaggaggttagaatgactcagcgcattgcgtatgtgaccggcggcatgggtggtatcggaaccgccatttgccagcggctggccaaggatggctttcgtgtggtggccggttgcggccccaactcgccgcgccgcgaaaagtggctggagcagcagaaggccctgggcttcgatttcattgcctcggaaggcaatgtggctgactgggactcgaccaagaccgcattcgacaaggtcaagtccgaggtcggcgaggttgatgtgctgatcaacaacgccggtatcacccgcgacgtggtgttccgcaagatgacccgcgccgactgggatgcggtgatcgacaccaacctgacctcgctgttcaacgtcaccaagcaggtgatcgacggcatggccgaccgtggctggggccgcatcgtcaacatctcgtcggtgaacgggcagaagggccagttcggccagaccaactactccaccgccaaggccggcctgcatggcttcaccatggcactggcgcaggaagtggcgaccaagggcgtgaccgtcaacacggtctctccgggctatatcgccaccgacatggtcaaggcgatccgccaggacgtgctcgacaagatcgtcgcgacgatcccggtcaagcgcctgggcctgccggaagagatcgcctcgatctgcgcctggttgtcgtcggaggagtccggtttctcgaccggcgccgacttctcgctcaacggcggcctgcatatgggctgaacaggaggcaataaatgagcgcacaatccctggaagtaggccagaaggcccgtctcagcaagcggttcggggcggcggaggtagccgccttcgccgcgctctcggaggacttcaaccccctgcacctggacccggccttcgccgccaccacggcgttcgagcggcccatagtccacggcatgctgctcgccagcctcttctccgggctgctgggccagcagttgccgggcaaggggagcatctatctgggtcaaagcctcagcttcaagctgccggtctttgtcggggacgaggtgacggccgaggtggaggtgaccgcccttcgcgaggacaagcccatcgccaccctgaccacccgcatcttcacccaaggcggcgccctcgccgtgacgggggaagccgtggtcaagctgccttaagttgaggaggtagataatgtctacaacacataacgtccctcagggcgatcttgttttacgtactttagccatgcccgccgataccaatgccaatggtgacatctttggtggttggttaatgtcacaaatggatattggcggcgctattctggcaaaagaaattgcccacggtcgcgtagtgactgtgcgggttgaaggaatgactttcttacggccggttgcggtcggcgatgtggtgtgctgctatgcacgctgtgtccagaaagggacgacatcggtcagcattaatattgaagtgtgggtgaaaaaagtagcgtctgaaccaatcgggcaacggtataaagcgacagaagcattatttaagtatgtcgcggttgatcctgaaggaaaacctcgcgccttacctgttgagtaaaaaggagtgtatataaatgagtttaacacaaggcatgaaagcaaaacagttgttagcctactttcagggaaaggctgatcaagatgcaagagaagcaaaagcaagaggcgaacttgtttgttggtctgcttccgtagctccccctgaattctgcgtgacaatgggtatcgcaatgatttatcctgagacccacgcagcaggtattggcgcaagaaaaggcgcaatggacatgttggaagttgctgatagaaaaggctacaatgttgactgctgttcttacggcagagtaaacatgggttacatggaatgcctgaaggaagctgcaattacaggtgtaaaacctgaggttttggtcaactctcctgcagcagacgttcctctgcctgacttggtaatcacatgtaataacatttgtaatacattgttgaaatggtatgaaaaccttgcggcagaattagacattccttgcatcgttatcgacgttcctttcaaccacacaatgcctattcctgaatatgcaaaagcttacattgcagatcagtttagaaatgcaatttctcagctggaagtaatctgtggtagaccttttgactggaagaagtttaaagaagttaaagatcagacacagcgttctgtataccactggaacagaattgcagaaatggctaaatataaaccatcacctttgaatggcttcgacttgtttaattacatggcattgatcgttgcttgccgttctttggattatgctgaaattacattcaaagcatttgctgatgaattagaagaaaacttgaaggctggtatctatgcattcaagggcgctgaaaagactcgtttccaatgggaaggtattgctgtatggcctcacttgggtcacacattcaagtccatgaagaacctcaattctatcatgacaggtacagcttaccctgcactttgggatttgcactatgatgcaaacgatgaatctatgcactctatggcagaagcttatacaagaatttatattaacacatgcttacagaacaaagttgaagttttgttgggcatcatggaaaaaggccaggttgacggtacagtttatcacttgaacagaagctgtaagttgatgagcttcctgaacgttgaaacagctgaaattatcaaagaaaagaatggtttgccttatgtaagcatcgatggtgaccagacagatcctcgcgtattctctcccgcacagtttgatacacgtgttcaggcactggttgaaatgatggaagccaacatggctgcagcagaataaatcacaaggaggatcacatgagtagagtagaagctattttatcccaattaaaagacgttgccgcaaatcctaaaaaggcaatggatgattataaggcggaaacaggtaagggtgcagtaggtattatgcctatttactcccctgaagaaatggtacacgcagctggttatttgcctatgggtatctggggtgcacaaggtaaaacaatttccaaggctcgtacatatcttcctgcatttgcttgttcagttatgcagcaggttatggaactgcagtgtgaaggcgcttatgatgacctttctgctgtaattttctctgtaccttgtgatacattaaagtgcttaagccagaaatggaaaggcacatcccctgtaattgtatttacacatcctcagaacagaggcttggaagctgcaaatcagttcttagtaacagagtatgaattggtaaaggctcagcttgaatcagttttgggtgtaaaaatttcaaacgctgctttggagaattccattgcaatttacaatgaaaacagagcagttatgcgtgaatttgtaaaggttgcagctgattaccctcaggtaattgatgcagttagccgtcatgctgttttcaaagcaagacagttcatgttaaaagaaaaacacacagcacttgtaaaagagctcattgctgaaattaaggctacacctgttcagccttgggatggcaagaaagttgttgttacaggtatcttacttgagcccaacgaattgcttgatatcttcaatgaattcaaaattgctatcgttgatgacgatttggctcaggaatccagacagattcgtgttgacgttctggatggcgaaggtggccctctttatagaatggcaaaagcttggcagcaaatgtacggttgctctcttgcaactgatacaaagaaaggccgcggcagaatgctgatcaacaagacaattcagacaggtgcagatgctatcgttgttgcgatgatgaaattctgtgatcctgaagaatgggattaccctgtaatgtacagagaatttgaagaaaaaggcgttaagagtctgatgatcgaagttgatcaggaagtttcttccttcgaacagatcaagacaagactgcagtctttcgtagaaatgctgtaaagtataggaggactacatgagcggaacaggacgactggcaggaaagattgcgttaattaccggtggcgccggcaatatcggcagtgaattgacacgtcgctttctcgcagagggagcgacggtcattattagtggacggaatcgggcgaagttgaccgcactggccgaacggatgcaggcagaggcaggagtgccggcaaagcgcatcgatctcgaagtcatggatgggagtgatccggtcgcggtacgtgccggtatcgaagcgattgtggcccgtcacggccagatcgacattctggtcaacaatgcaggaagtgccggtgcccagcgtcgtctggccgagattccactcactgaagctgaattaggccctggcgccgaagagacgcttcatgccagcatcgccaatttacttggtatgggatggcatctgatgcgtattgcggcacctcatatgccggtaggaagtgcggtcatcaatgtctcgaccatcttttcacgggctgagtactacgggcggattccgtatgtcacccctaaagctgctcttaatgctctatctcaacttgctgcgcgtgagttaggtgcacgtggcatccgcgttaatacgatctttcccggcccgattgaaagtgatcgcatccgtacagtgttccagcgtatggatcagctcaaggggcggcccgaaggcgacacagcgcaccattttttgaacaccatgcgattgtgtcgtgccaacgaccagggcgcgcttgaacgtcggttcccctccgtcggtgatgtggcagacgccgctgtctttctggccagtgccgaatccgccgctctctccggtgagacgattgaggttacgcacggaatggagttgccggcctgcagtgagaccagcctgctggcccgtactgatctgcgcacgattgatgccagtggccgcacgacgctcatctgcgccggcgaccagattgaagaggtgatggcgctcaccggtatgttgcgtacctgtgggagtgaagtgatcatcggcttccgttcggctgcggcgctggcccagttcgagcaggcagtcaatgagagtcggcggctggccggcgcagactttacgcctcccattgccttgccactcgatccacgcgatccggcaacaattgacgctgtcttcgattgggccggcgagaataccggcgggattcatgcagcggtgattctgcctgctaccagtcacgaaccggcaccgtgcgtgattgaggttgatgatgagcgggtgctgaattttctggccgatgaaatcaccgggacaattgtgattgccagtcgcctggcccgttactggcagtcgcaacggcttacccccggcgcacgtgcgcgtgggccgcgtgtcatttttctctcgaacggtgccgatcaaaatgggaatgtttacggacgcattcaaagtgccgctatcggtcagctcattcgtgtgtggcgtcacgaggctgaacttgactatcagcgtgccagcgccgccggtgatcatgtgctgccgccggtatgggccaatcagattgtgcgcttcgctaaccgcagccttgaagggttagaatttgcctgtgcctggacagctcaattgctccatagtcaacgccatatcaatgagattaccctcaacatccctgccaacattagcgccaccaccggcgcacgcagtgcatcggtcggatgggcggaaagcctgatcgggttgcatttggggaaagttgccttgattaccggtggcagcgccggtattggtgggcagatcgggcgcctcctggctttgagtggcgcgcgcgtgatgctggcagcccgtgatcggcataagctcgaacagatgcaggcgatgatccaatctgagctggctgaggtggggtataccgatgtcgaagatcgcgtccacattgcaccgggctgcgatgtgagtagcgaagcgcagcttgcggatcttgttgaacgtaccctgtcagcttttggcaccgtcgattatctgatcaacaacgccgggatcgccggtgtcgaagagatggttatcgatatgccagttgagggatggcgccataccctcttcgccaatctgatcagcaactactcgttgatgcgcaaactggcgccgttgatgaaaaaacagggtagcggttacatccttaacgtctcatcatactttggcggtgaaaaagatgcggccattccctaccccaaccgtgccgattacgccgtctcgaaggctggtcagcgggcaatggccgaagtctttgcgcgcttccttggcccggagatacagatcaatgccattgcgccgggtccggtcgaaggtgatcgcttgcgcggtaccggtgaacgtcccggcctctttgcccgtcgggcgcggctgattttggagaacaagcggctgaatgagcttcacgctgctcttatcgcggctgcgcgcaccgatgagcgatctatgcacgaactggttgaactgctcttacccaatgatgtggccgcactagagcagaatcccgcagcacctaccgcgttgcgtgaactggcacgacgttttcgcagcgaaggcgatccggcggcatcatcaagcagtgcgctgctgaaccgttcaattgccgctaaattgctggctcgtttgcataatggtggctatgtgttgcctgccgacatctttgcaaacctgccaaacccgcccgatcccttcttcacccgagcccagattgatcgcgaggctcgcaaggttcgtgacggcatcatggggatgctctacctgcaacggatgccgactgagtttgatgtcgcaatggccaccgtctattaccttgccgaccgcaatgtcagtggtgagacattccacccatcaggtggtttgcgttacgaacgcacccctaccggtggcgaactcttcggcttgccctcaccggaacggctggcggagctggtcggaagcacggtctatctgataggtgaacatctgactgaacaccttaacctgcttgcccgtgcgtacctcgaacgttacggggcacgtcaggtagtgatgattgttgagacagaaaccggggcagagacaatgcgtcgcttgctccacgatcacgtcgaggctggtcggctgatgactattgtggccggtgatcagatcgaagccgctatcgaccaggctatcactcgctacggtcgcccagggccggtcgtctgtacccccttccggccactgccgacggtaccactggtcgggcgtaaagacagtgactggagcacagtgttgagtgaggctgaatttgccgagttgtgcgaacaccagctcacccaccatttccgggtagcgcgcaagattgccctgagtgatggtgccagtctcgcgctggtcactcccgaaactacggctacctcaactaccgagcaatttgctctggctaacttcatcaaaacgacccttcacgcttttacggctacgattggtgtcgagagcgaaagaactgctcagcgcattctgatcaatcaagtcgatctgacccggcgtgcgcgtgccgaagagccgcgtgatccgcacgagcgtcaacaagaactggaacgttttatcgaggcagtcttgctggtcactgcaccactcccgcctgaagccgatacccgttacgccgggcggattcatcgcggacgggcgattaccgtgtaaaatcataggaggatcaacatgatcgacactgcgccccttgccccaccacgggcgccccgctctaatccgattcgggatcgagttgattgggaagctcagcgcgctgctgcgctggcagatcccggtgcctttcatggcgcgattgcccggacagttatccactggtacgacccacaacaccattgctggattcgcttcaacgagtctagtcagcgttgggaagggctggatgccgctaccggtgcccctgtaacggtagactatcccgccgattatcagccctggcaacaggcgtttgatgatagtgaagcgccgttttaccgctggtttagtggtgggttgacaaatgcctgctttaatgaagtagaccggcatgtcatgatgggctatggcgacgaggtggcctactactttgaaggtgaccgctgggataactcgctcaacaatggtcgtggtggtccggttgtccaggagacaatcacgcggcggcgcctgttggtggaggtggtgaaggctgcgcaggtgttgcgtgatctgggcctgaagaagggtgatcggattgctctgaatatgccgaatattatgccgcagatttattatacggaagcggcaaaacgactgggtattctgtacacgccggtcttcggtggcttctcggacaagactctttccgaccgtattcacaatgccggtgcacgagtggtgattacctctgatggtgcgtaccgcaacgcgcaggtggtgccctacaaagaagcgtataccgatcaggcgctcgataagtatattccggttgagacggcgcaggcgattgttgcgcagaccctggccaccttgcccctgactgagtcgcagcgccagacgatcatcaccgaagtggaggccgcactggccggtgagattacggttgagcgctcggacgtgatgcgtggggttggttctgccctcgcaaagctccgcgatcttgatgcaagcgtgcaggcaaaggtgcgtacagtactggcgcaggcgctggtcgagtcgccgccgcgggttgaagctgtggtggttgtgcgtcataccggtcaggagattttgtggaacgaggggcgagatcgctggagtcacgacttgctggatgctgcgctggcgaagattctggccaatgcgcgtgctgccggctttgatgtgcacagtgagaatgatctgctcaatctccccgatgaccagcttatccgtgcgctctacgccagtattccctgtgaaccggttgatgctgaatatccgatgtttatcatttacacatcgggtagcaccggtaagcccaagggtgtgatccacgttcacggcggttatgtcgccggtgtggtgcacaccttgcgggtcagttttgacgccgagccgggtgatacgatatatgtgatcgccgatccgggctggatcaccggtcagagctatatgctcacagccacaatggccggtcggctgaccggggtgattgccgagggatcaccgctcttcccctcagccgggcgttatgccagcatcatcgagcgctatggggtgcagatctttaaggcgggtgtgaccttcctcaagacagtgatgtccaatccgcagaatgttgaagatgtgcgactctatgatatgcactcgctgcgggttgcaaccttctgcgccgagccggtcagtccggcggtgcagcagtttggtatgcagatcatgaccccgcagtatatcaattcgtactgggcgaccgagcacggtggaattgtctggacgcatttctacggtaatcaggacttcccgcttcgtcccgatgcccatacctatcccttgccctgggtgatgggtgatgtctgggtggccgaaactgatgagagcgggacgacgcgctatcgggtcgctgatttcgatgagaagggcgagattgtgattaccgccccgtatccctacctgacccgcacactctggggtgatgtgcccggtttcgaggcgtacctgcgcggtgagattccgctgcgggcctggaagggtgatgccgagcgtttcgtcaagacctactggcgacgtgggccaaacggtgaatggggctatatccagggtgattttgccatcaagtaccccgatggtagcttcacgctccacggacgctctgacgatgtgatcaatgtgtcgggccaccgtatgggcaccgaggagattgagggtgccattttgcgtgaccgccagatcacgcccgactcgcccgtcggtaattgtattgtggtcggtgcgccgcaccgtgagaagggtctgaccccggttgccttcattcaacctgcgcctggccgtcatctgaccggcgccgaccggcgccgtctcgatgagctggtgcgtaccgagaagggggcggtcagtgtcccagaggattacatcgaggtcagtgcctttcccgaaacccgcagcgggaagtatatgcggcgctttttgcgcaatatgatgctcgatgaaccactgggtgatacgacgacgttgcgcaatcctgaagtgctcgaagagattgcagccaagatcgctgagtggaaacgccgtcagcgtatggccgaagagcagcagatcatcgaacgctatcgctacttccggatcgagtatcacccaccaacggccagtgcgggtaaactcgcggtagtgacggtgacaaatccgccggtgaacgcactgaatgagcgtgcgctcgatgagttgaacacaattgttgaccacctggcccgtcgtcaggatgttgccgcaattgtcttcaccggacagggcgccaggagttttgtcgccggcgctgatattcgccagttgctcgaagagattcatacggttgaagaggcaatggccctgccgaataacgcccatcttgctttccgcaagattgagcgtatgaataagccgtgtatcgcggcgatcaacggtgtggcgctcggtggtggtctggaattcgccatggcctgccattaccgggttgccgatgtctatgccgaattcggtcagccagagattaatctgcgcttgctacctggttatggtggcacgcagcgcttgccgcgcctgttgtacaagcgcaacaacggcaccggtctgctccgagcgctggagatgattctgggtgggcgtagcgtaccggctgatgaggcgctggagctgggtctgatcgatgccattgctaccggcgatcaggactcactgtcgctggcatgcgcgttagcccgtgccgcaatcggcgccgatggtcagttgatcgagtcggctgcggtgacccaggctttccgccatcgccacgagcagcttgacgagtggcgcaaaccagacccgcgctttgccgatgacgaactgcgctcgattatcgcccatccacgtatcgagcggattatccggcaggcccataccgttgggcgcgatgcggcagtgcatcgggcactggatgcaatccgctatggcattatccacggcttcgaggccggtctggagcacgaggcgaagctctttgccgaggcagtggttgacccgaacggtggcaagcgtggtattcgcgagttcctcgaccgccagagtgcgccgttgccaacccgccgaccattgattacacctgaacaggagcaactcttgcgcgatcagaaagaactgttgccggttggttcacccttcttccccggtgttgaccggattccgaagtggcagtacgcgcagacggttattcgtgatccggacaccggtgcggcggctcacggcgatcccatcgtggctgaaaagcagattattgtgccggtggaacgcccccgcgccaatcaggcgctgatctatgttctggcctcggaggtgaacttcaacgatatctgggcgattaccggtattccggtgtcacggtttgatgagcacgaccgcgactggcacgttaccggttcaggtggcatcggcctgatcgttgcgctgggtgaagaggcgcgacgcgaaggccggctgaaggtgggtgatctggtggcgatctactccgggcagtcggatctgctctcaccgctgatgggccttgatccgatggccgccgatttcgtcatccaggggaacgacacgccagatggatcgcatcagcaatttatgctggcccaggccccgcagtgtctgcccatcccaaccgatatgtctatcgaggcagccggcagctacatcctcaatctcggtacgatctatcgcgccctctttacgacgttgcaaatcaaggccggacgcaccatctttatcgagggtgcggcgaccggtaccggtctggacgcagcgcgctcggcggcccggaatggtctgcgcgtaattggaatggtcagttcgtcgtcacgtgcgtctacgctgctggctgcgggtgcccacggtgcgattaaccgtaaagacccggaggttgccgattgtttcacgcgcgtgcccgaagatccatcagcctgggcagcctgggaagccgccggtcagccgttgctggcgatgttccgggcgcagaacgacgggcgactggccgattatgtggtctcgcacgcgggcgagacggccttcccgcgcagtttccagcttctcggcgagccacgcgatggtcacattccgacgctcacattctacggtgccaccagtggctaccacttcaccttcctgggtaagccagggtcagcttcgccgaccgagatgctgcggcgggccaatctccgcgccggtgaggcggtgttgatctactacggggttgggagcgatgacctggtagataccggcggtctggaggctatcgaggcggcgcggcaaatgggagcgcggatcgtcgtcgttaccgtcagcgatgcgcaacgcgagtttgtcctctcgttgggcttcggggctgccctacgtggtgtcgtcagcctggcggaactcaaacggcgcttcggcgatgagtttgagtggccgcgcacgatgccgccgttgccgaacgcccgccaggacccgcagggtctgaaagaggctgtccgccgcttcaacgatctggtcttcaagccgctaggaagcgcggtcggtgtcttcttgcggagtgccgacaatccgcgtggctaccccgatctgatcatcgagcgggctgcccacgatgcactggcggtgagcgcgatgctgatcaagcccttcaccggacggattgtctacttcgaggacattggtgggcggcgttactccttcttcgcaccgcaaatctgggtgcgccagcgccgcatctacatgccgacggcacagatctttggtacgcacctctcaaatgcgtatgaaattctgcgtctgaatgatgagatcagcgccggtctgctgacgattaccgagccggcagtggtgccgtgggatgaactacccgaagcacatcaggcgatgtgggaaaatcgccacacggcggccacttatgtggtgaatcatgccttaccacgtctcggcctaaagaacagggacgagctgtacgaggcgtggacggccggcgagcggtagaactagaggaggactactatgctcctatttccaagaagaactaatatagcctttttcaaaacaacaggcatttttgctaattttcctttgctaggtagaaccattacaacttcaccatctttccttacacataaactgtcaaaggaagtaaccagggcatcaacttcgcctccaagaccaaagagaattgttgtcgcaattactggtgcgactggtgttgcactgggaatcagacttctacaagtgctaaaagagttgagcgtagaaacccatttggtgatttcaaaatggggtgcagcaacaatgaaatatgaaacagattgggaaccgcatgacgtggcggccttggcaaccaagacatactctgttcgtgatgtttctgcatgcatttcgtccggatctttccagcatgatggtatgattgttgtgccctgttccatgaaatcactagctgctattagaatcggttttacagaggatttaattacaagagctgccgatgtttcgattaaagagaatcgtaagttactactggttactcgggaaacccctttatcttccatccatcttgaaaacatgttgtctttatgcagggcaggtgttataatttttcctccggtacctgcgttttatacaagacccaagagccttcatgacctattagaacaaagtgttggcaggatcctagactgctttggcatccacgctgacacttttcctcgttgggaaggaataaaaagcaagtaacttacaggaggatcacaagatgacgcgtgaagtggtagtggtaagcggtgtccgtaccgcgatcgggacctttggcggcagcctgaaggatgtggcaccggcggagctgggcgcactggtggtgcgcgaggcgctggcgcgcgcgcaggtgtcgggcgacgatgtcggccacgtggtattcggcaacgtgatccagaccgagccgcgcgacatgtatctgggccgcgtcgcggccgtcaacggcggggtgacgatcaacgcccccgcgctgaccgtgaaccgcctgtgcggctcgggcctgcaggccattgtcagcgccgcgcagaccatcctgctgggcgataccgacgtcgccatcggcggcggcgcggaaagcatgagccgcgcaccgtacctggcgccggcagcgcgctggggcgcacgcatgggcgacgccggcctggtcgacatgatgctgggtgcgctgcacgatcccttccatcgcatccacatgggcgtgaccgccgagaatgtcgccaaggaatacgacatctcgcgcgcgcagcaggacgaggccgcgctggaatcgcaccgccgcgcttcggcagcgatcaaggccggctacttcaaggaccagatcgtcccggtggtgagcaagggccgcaagggcgacgtgaccttcgacaccgacgagcacgtgcgccatgacgccaccatcgacgacatgaccaagctcaggccggtcttcgtcaaggaaaacggcacggtcacggccggcaatgcctcgggcctgaacgacgccgccgccgcggtggtgatgatggagcgcgccgaagccgagcgccgcggcctgaagccgctggcccgcctggtgtcgtacggccatgccggcgtggacccgaaggccatgggcatcggcccggtgccggcgacgaagatcgcgctggagcgcgccggcctgcaggtgtcggacctggacgtgatcgaagccaacgaagcctttgccgcacaggcgtgcgccgtgaccaaggcgctcggtctggacccggccaaggttaacccgaacggctcgggcatctcgctgggccacccgatcggcgccaccggtgccctgatcacggtgaaggcgctgcatgagctgaaccgcgtgcagggccgctacgcgctggtgacgatgtgcatcggcggcgggcagggcattgccgccatcttcgagcgtatctgactatcataaaaataagaagcctgcatttgcaggcttcttatttttat

SEQ ID NO: 51 - DNA, 28192 bp, artificial sequence
  plasmid SG823
agtgagcaataaaaataagaagcctgcatttgcaggcttcttatttttatagaccggggacttatcagccaacctgtaggccagcaaaaggccaggaaccgtaaaaaggccgcgttgctggcgtttttccataggctccgcccccctgacgagcatcacaaaaatcgacgctcaagtcagaggtggcgaaacccgacaggactataaagataccaggcgtttccccctggaagctccctcgtgcgctctcctgttccgaccctgccgcttaccggatacctgtccgcctttctcccttcgggaagcgtggcgctttctcatagctcacgctgtaggtatctcagttcggtgtaggtcgttcgctccaagctgggctgtgtgcacgaaccccccgttcagcccgaccgctgcgccttatccggtaactatcgtcttgagtccaacccggtaagacacgacttatcgccactggcagcagccactggtaacaggattagcagagcgaggtatgtaggcggtgctacagagttcttgaagtggtggcctaactacggctacactagaagaacagtatttggtatctgcgctctgctgaagccagttaccttcggaaaaagagttggtagctcttgatccggcaaacaaaccaccgctggtagcggtggtttttttgtttgcaagcagcagattacgcgcagaaaaaaaggatctcaagaagatcctttgatcttttctacggggtctgacgctcagtggaacgaaaactcacgttaagggattttggtcatgagattatcaaaaaggatcttcacctagatccttttaaattaaaaatgaagttttaaatcaatctaaagtatatatgagtaaacttggtctgacagactcttcctttttcaatattattgaagcatttatcagggttattgtctcatgagcggatacatatttgaatgtatttagaaaaataaacaaataggggttccgcgcacatttccccgaaaagtgccacctgacggtcctgcaggtaatacgactcactatagggataacttaaatttatattttttactttataatatataattgattatagaatccaaattagataggaggaccaggtaaatggagaataattttattgtcaacgaaaacgagaaaagggttttaaagcagatatttaacaactccaatatcagtagaactcaaatttccaagaatttagaactgaataaagcaacaatttcgaacattcttaacaatctaaagcataaaagtttggtaaatgaagttggtgaaggaaattctactaaaagtggtggaagaaaacctatacttctcgaaattaatcaaaagtatgggtattatataagcatggatttgacatatgattctgttgagttaatgtataactattttgatgctacaattctcaaacaagatagttatgaactgaatgataagaatgtaagtagcatattacagatactcaaatctaacataaatgttagcgaaaaatacgacacattatacggtttattagggataagtatatccatacatgggattgtagatgatgaacaaaacatcattaatctaccatttcacaagaatgaaaaaagaacgtttactgatgaacttaagtctttcactaatgtaccagtggttattgaaaatgaggcaaatttaagtgcattatacgagaaaagtttatacatcaattcgaatattaacaacttgatcacattgtctatacataaaggtataggagctggcatcataatcaataagaaactctatagaggtagtaatggagaagctggagaaataggaaagactcttgttttagagtctatcaataacaatgataacaagtactataaaatagaggatatttgtagtcaagacgctttgatacaaaagattaataacagattaggagttacacttacatttaccgaactaatacagtattataacgaaggaaatagtattgtagctcatgaaatcaaacagtttatcaacaaaatgactgtcttaatacacaatcttaatactcagtttaatccagatgcaatatacatcaattgtcccttgattaatgaacttcctaatattctaaacgaaatcaaagaacaattctcttgtttttcacaaggaagtcctatacaattgcatttaaccactaatgttaaacaagctacattattaggtggaacattagcaattatgcagaaaacccttaacataaacaatatccaaatgaatattaaatagttacagcagtctgagttataaaatagatatctcggaccgtctattcttccttatttgagtgggtaccaatgaaatctttcgagctaaatcgatttctggcccactcttttttattttttagtaagcgtttacaaaaaatgaacaatgtgctatattacctctaaagttagtttgtttattaaattaaccaactaaaatgtcgggatccttactgcaataggttgctactgttttatcatgaatcatcaacgaatgtattttgcatatttcagtatctttaataaactctttgcaatttttacaagttttcatatacgcccttcttttcataaattaatttatgaattctatgtattccaaggagcttttggatccaattaggaggaatctgcgatggaaaaaaaggaatttcgtgttttgataaaatactgttttctgaagggaaaaaatacggtggaagcaaaaacttggcttgataatgagtttccggactctgccccagggaaatcaacaataattgattggtatgcaaaattcaagcgtggtgaaatgagcacggaggacggtgaacgcagtggacgcccgaaagaggtggttaccgacgaaaacatcaaaaaaatccacaaaatgattttgaatgaccgtaaaatgaagttgatcgagatagcagaggccttaaagatatcaaaggaacgtgttggtcatatcattcatcaatatttggatatgcggaagctctgtgcaaaatgggtgccgcgcgagctcacatttgaccaaaaacaacaacgtgttgatgattctgagcggtgtttgcagctgttaactcgtaatacacccgagtttttccgtcgatatgtgacaatggatgaaacatggctccatcactacactcctgagtccaatcgacagtcggctgagtggacagcgaccggtgaaccgtctccgaagcgtggaaagactcaaaagtccgctggcaaagtaatggcctctgttttttgggatgcgcatggaataatttttatcgattatcttgagaagggaaaaaccatcaacagtgactattatatggcgttattggagcgtttgaaggtcgaaatcgcggcaaaacggccccacatgaagaagaaaaaagtgttgttccaccaagacaacgcaccgtgccacaagtcattgagaacgatggcaaaaattcatgaattgggcttcgaattgcttccccacccaccgtattctccagatctggcccccagcgactttttcttgttctcagacctcaaaaggatgctcgcagggaaaaaatttggctgcaatgaagaggtgatcgccgaaactgaggcctattttgaggcaaaaccgaaggagtactaccaaaatggtatcaaaaaattggaaggtcgttataatcgttgtatcgctcttgaagggaactatgttgaataagaattccttaattaaggagctcgataaaaataagaagcctgcatttgcaggcttcttatttttatggtcatagctgtttcctggcgcgccgccattatttttttgaacaattgacaattcatttcttattttttattaagtgatagtcaaaaggcataacagtgctgaatagaaagaaatttacagaaaagaaaattatagaatttagtatgattaattatactcatttatgaatgtttaattgaatacaaaaaaaaatacttgttatgtattcaattacgggttaaaatatagacaagttgaaaaatttaataaaaaaataagtcctcagctcttatatattaagctaccaacttagtatataagccaaaacttaaatgtgctaccaacacatcaagccgttagagaactctatctatagcaatatttcaaatgtaccgacatacaagagaaacattaactatatatattcaatttatgagattatcttaacagatataaatgtaaattgcaataagtaagatttagaagtttatagcctttgtgtattggaagcagtacgcaaaggcttttttatttgataaaaattagaagtatatttattttttcataattaatttatgaaaatgaaagggggtgagcaaagtgacagaggaaagcagtatcttatcaaataacaaggtattagcaatatcattattgactttagcagtaaacattatgacttttatagtgcttgtagctaagtagtacgaaagggggagctttaaaaagctccttggaatacatagaattcataaattaatttatgaaaagaagggcgtatatgaaaacttgtaaaaattgcaaagagtttattaaagatactgaaatatgcaaaatacattcgttgatgattcatgataaaacagtagcaacctattgcagtaaatacaatgagtcaagatgtttacataaagggaaagtccaatgtattaattgttcaaagatgaaccgatatggatggtgtgccataaaaatgagatgttttacagaggaagaacagaaaaaagaacgtacatgcattaaatattatgcaaggagctttaaaaaagctcatgtaaagaagagtaaaaagaaaaaataatttatttattaatttaatattgagagtgccgacacagtatgcactaaaaaatatatctgtggtgtagtgagccgatacaaaaggatagtcactcgcattttcataatacatcttatgttatgattatgtgtcggtgggacttcacgacgaaaacccacaataaaaaaagagttcggggtagggttaagcatagttgaggcaactaaacaatcaagctaggatatgcagtagcagaccgtaaggtcgttgtttaggtgtgttgtaatacatacgctattaagatgtaaaaatacggataccaatgaagggaaaagtataatttttggatgtagtttgtttgttcatctatgggcaaactacgtccaaagccgtttccaaatctgctaaaaagtatatcctttctaaaatcaaagtcaagtatgaaatcataaataaagtttaattttgaagttattatgatattatgtttttctattaaaataaattaagtatatagaatagtttaataatagtatatacttaatgtgataagtgtctgacagtgtcacagaaaggatgattgttatggattataagcggccggccagtgggcaagttgaaaaattcacaaaaatgtggtataatatctttgttcattagagcgataaacttgaatttgagagggaacttagatggtatttgaaaaaattgataaaaatagttggaacagaaaagagtattttgaccactactttgcaagtgtaccttgtacctacagcatgaccgttaaagtggatatcacacaaataaaggaaaagggaatgaaactatatcctgcaatgctttattatattgcaatgattgtaaaccgccattcagagtttaggacggcaatcaatcaagatggtgaattggggatatatgatgagatgataccaagctatacaatatttcacaatgatactgaaacattttccagcctttggactgagtgtaagtctgactttaaatcatttttagcagattatgaaagtgatacgcaacggtatggaaacaatcatagaatggaaggaaagccaaatgctccggaaaacatttttaatgtatctatgataccgtggtcaaccttcgatggctttaatctgaatttgcagaaaggatatgattatttgattcctatttttactatggggaaatattataaagaagataacaaaattatacttcctttggcaattcaagttcatcacgcagtatgtgacggatttcacatttgccgttttgtaaacgaattgcaggaattgataaatagttaacttcaggtttgtctgtaactaaaaacaagtatttaagcaaaaacatcgtagaaatacggtgttttttgttaccctaagtttactctatcattgatagagtgcgactctatcattgatagagtccacaggttggctgataagtccccggtctgtaccgttcgtataatgtatgctatacgaagttataggaggttataatgaacgagaaaaatataaaacacagtcaaaactttattacttcaaaacataatatagataaaataatgacaaatataagattaaatgaacatgataatatctttgaaatcggctcaggaaaagggcattttacccttgaattagtacagaggtgtaatttcgtaactgccattgaaatagaccataaattatgcaaaactacagaaaataaacttgttgatcacgataatttccaagttttaaacaaggatatattgcagtttaaatttcctaaaaaccaatcctataaaatatttggtaatataccttataacataagtacggatataatacgcaaaattgtttttgatagtatagctgatgagatttatttaatcgtggaatacgggtttgctaaaagattattaaatacaaaacgctcattggcattatttttaatggcagaagttgatatttctatattaagtatggttccaagagaatattttcatcctaaacctaaagtgaatagctcacttatcagattaaatagaaaaaaatcaagaatatcacacaaagataaacagaagtataattatttcgttatgaaatgggttaacaaagaatacaagaaaatatttacaaaaaatcaatttaacaattccttaaaacatgcaggaattgacgatttaaacaatattagctttgaacaattcttatctcttttcaatagctataaattatttaataagtaagttaagggatgcataaactgcatcccttaacttgtttttcgtgtacctattttttgtgaatcgattatgtcttttgcgcattcgtcgacaattgcatatattgataaaaataataatagtgggtataattaagttgttaggaggttagttagaatgagtagactcgataagtctaaagtgataaattccgcattagaactccttaatgaagttggaattgaaggtctaactaccaggaaattagctcagaaacttggagttgaacaaccaacattgtactggcatgtcaaaaacaaaagagcactcttagatgcattagcaatcgaaatgttagacagacatcatacacacttttgtccattagaaggtgaaagttggcaagactttttgaggaataacgcgaaaagtttcagatgtgctttactatcccatagagatggggctaaagttcacttaggaactagacctacagaaaagcagtatgagacacttgaaaatcagttggcatttctatgtcaacaaggattctcattagagaacgcattatatgctctttcagctgtaggtcatttcacgttaggttgtgttttggaagatcaagaacatcaagttgcaaaagaagagagagaaactcctactacagatagtatgccacctttattacgacaagctatagaactgtttgatcatcaaggagctgaacctgcgtttctctttggattggagttaataatttgcggactagagaaacagcttaagtgtgaaagtggatcttagttagcaccggtcagggtggtgaatgtgaaaccagtaacgttatacgatgtcgcagagtatgccggtgtctcttatcagaccgtttcccgcgtggtgaaccaggccagccacgtttctgcgaaaacgcgggaaaaagtggaagcggcgatggcggagctgaattacattcccaaccgcgtggcacaacaactggcgggcaaacagtcgttgctgattggcgttgccacctccagtctggccctgcacgcgccgtcgcaaattgtcgcggcgattaaatctcgcgccgatcaactgggtgccagcgtggtggtgtcgatggtagaacgaagcggcgtcgaagcctgtaaagcggcggtgcacaatcttctcgcgcaacgcgtcagtgggctgatcattaactatccgctggatgaccaggatgccattgctgtggaagctgcctgcactaatgttccggcgttatttcttgatgtctctgaccagacacccatcaacagtattattttctcccatgaagacggtacgcgactgggcgtggagcatctggtcgcattgggtcaccagcaaatcgcgctgttagcgggcccattaagttctgtctcggcgcgtctgcgtctggctggctggcataaatatctcactcgcaatcaaattcagccgatagcggaacgggaaggcgactggagtgccatgtccggttttcaacaaaccatgcaaatgctgaatgagggcatcgttcccactgcgatgctggttgccaacgatcagatggcgctgggcgcaatgcgcgccattaccgagtccgggctgcgcgttggtgcggacatctcggtagtgggatacgacgataccgaagacagctcatgttatatcccgccgttaaccaccatcaaacaggattttcgcctgctggggcaaaccagcgtggaccgcttgctgcaactctctcagggccaggcggtgaagggcaatcagctgttgcccgtctcactggtgaaaagaaaaaccaccctggcgcccaatacgcaaaccgcctctccccgcgcgttggccgattcattaatgcagctggcacgacaggtttcccgactggaaagcgggcagtgagcgcaacgcaattaatgtaagttagctcactcattaggcaccgggatctcgaccgatgcccttgagagccttcaacccagtcagctccttccggtgggcgcggggcatgactagcatgatcgtgctcctgtcgttgaggacccggctaggctggcggggttgccttactggttagcagaatgaatcaccgatacgcgataacttcgtataatgtatgctatacgaacggtagctcagctagcacccggaattgtgagcggataacaattccttggaattgtgagcggataacaattataattaagttgttaggaggttagaatgagtctgaatttccttgattttgaacagccgattgcagagctggaagcgaaaatcgattctctgactgcggttagccgtcaggatgagaaactggatattaacatcgatgaagaagtgcatcgtctgcgtgaaaaaagcgtagaactgacacgtaaaatcttcgccgatctcggtgcatggcagattgcgcaactggcacgccatccacagcgtccttataccctggattacgttcgcctggcatttgatgaatttgacgaactggctggcgaccgcgcgtatgcagacgataaagctatcgtcggtggtatcgcccgtctcgatggtcgtccggtgatgatcattggtcatcaaaaaggtcgtgaaaccaaagaaaaaattcgccgtaactttggtatgccagcgccagaaggttaccgcaaagcactgcgtctgatgcaaatggctgaacgctttaagatgccaatcatcacctttatcgacaccccgggggcttatccgggcgtgggcgcagaagagcgcggtcagtctgaagccattgcacgcaacctgcgtgaaatgtctcgccttagcgtaccgactatttgtaccgttatcggtgaaggtggttctggcggcgcgctggcgattggcgtgggcgataaagtgaatatgctgcaatacagcacctattccgttatctcgccggaaggttgtgcgtccattctgtggaagagcgctgataaagcgccgctggcggctgaagcgatgggtatcatcgctccgcgtctgaaagaactaaaactgatcgactccatcatcccagaaccgctgggtggtgctcaccgtaacccggaagcgatggcggcatcgttgaaagcgcaactgttggcggatctggccgatctcgacgtgttaagcactgaagatttaaaaaatcgtcgttatcagcgcctgatgagctacggttacgcgtaataaggaggaacccactcatggatattcgtaagattaaaaaactgatcgagctggttgaagaatcaggcatctccgaactggaaatttctgaaggcgaagagtcagtacgcattagccgtgcagctcctgccgcaagtttccctgtgatgcaacaagcttacgctgcaccaatgatgcagcagccagctcaatctaacgcagccgctccggcgaccgttccttccatggaagcgccagcagcagcggaaatcagtggtcacatcgtacgttccccgatggttggtactttctaccgcaccccaagcccggacgcaaaagcgttcatcgaagtgggtcagaaagtcaacgtgggcgataccctgtgcatcgttgaagccatgaaaatgatgaaccagatcgaagcggacaaatccggtaccgtgaaagcaattctggtcgaaagtggacaaccggtagaatttgacgagccgctggtcgtcatcgagtaacgaggcgaacatgctggataaaattgttattgccaaccgcggcgagattgcattgcgtattcttcgtgcctgtaaagaactgggcatcaagactgtcgctgtgcactccagcgcggatcgcgatctaaaacacgtattactggcagatgaaacggtctgtattggccctgctccgtcagtaaaaagttatctgaacatcccggcaatcatcagcgccgctgaaatcaccggcgcagtagcaatccatccgggttacggcttcctctccgagaacgccaactttgccgagcaggttgaacgctccggctttatcttcattggcccgaaagcagaaaccattcgcctgatgggcgacaaagtatccgcaatcgcggcgatgaaaaaagcgggcgtcccttgcgtaccgggttctgacggcccgctgggcgacgatatggataaaaaccgtgccattgctaaacgcattggttatccggtgattatcaaagcctccggcggcggcggcggtcgcggtatgcgcgtagtgcgcggcgacgctgaactggcacaatccatctccatgacccgtgcggaagcgaaagctgctttcagcaacgatatggtttacatggagaaatacctggaaaatcctcgccacgtcgagattcaggtactggctgacggtcagggcaacgctatctatctggcggaacgtgactgctccatgcaacgccgccaccagaaagtggtcgaagaagcgccagcaccgggcattaccccggaactgcgtcgctacatcggcgaacgttgcgctaaagcgtgtgttgatatcggctatcgcggtgcaggtactttcgagttcctgttcgaaaacggcgagttctatttcatcgaaatgaacacccgtattcaggtagaacacccggttacagaaatgatcaccggcgttgacctgatcaaagaacagctgcgtatcgctgccggtcaaccgctgtcgatcaagcaagaagaagttcacgttcgcggccatgcggtggaatgtcgtatcaacgccgaagatccgaacaccttcctgccaagtccgggcaaaatcacccgtttccacgcacctggcggttttggcgtacgttgggagtctcatatctacgcgggctacaccgtaccgccgtactatgactcaatgatcggtaagctgatttgctacggtgaaaaccgtgacgtggcgattgcccgcatgaagaatgcgctgcaggagctgatcatcgacggtatcaaaaccaacgttgatctgcagatccgcatcatgaatgacgagaacttccagcatggtggcactaacatccactatctggagaaaaaactcggtcttcaggaaaaataatataggaggatataacatgagctggattgaacgaattaaaagcaacattactcccacccgcaaggcgagcattcctgaaggggtgtggactaagtgtgatagctgcggtcaggttttataccgcgctgagctggaacgtaatcttgaggtctgtccgaagtgtgaccatcacatgcgtatgacagcgcgtaatcgcctgcatagcctgttagatgaaggaagccttgtggagctgggtagcgagcttgagccgaaagatgtgctgaagtttcgtgactccaagaagtataaagaccgtctggcatctgcgcagaaagaaaccggcgaaaaagatgcgctggtggtgatgaaaggcactctgtatggaatgccggttgtcgctgcggcattcgagttcgcctttatgggcggttcaatggggtctgttgtgggtgcacgtttcgtgcgtgccgttgagcaggcgctggaagataactgcccgctgatctgcttctccgcctctggtggcgcacgtatgcaggaagcactgatgtcgctgatgcagatggcgaaaacctctgcggcactggcaaaaatgcaggagcgcggcttgccgtacatctccgtgctgaccgacccgacgatgggcggtgtttctgcaagtttcgccatgctgggcgatctcaacatcgctgaaccgaaagcgttaatcggctttgccggtccgcgtgttatcgaacagaccgttcgcgaaaaactgccgcctggattccagcgcagtgaattcctgatcgagaaaggcgcgatcgacatgatcgtccgtcgtccggaaatgcgcctgaaactggcgagtattctggcgaagttgatgaatctgccagcgccgaatcctgaagcgccgcgtgaaggcgtagtggtacccccggtaccggatcaggaacctgaggcctgagactaggaggatcttaaatgaccgacgtccgattccgcattatcggtacgggtgcctacgtaccggaacggatcgtctccaacgatgaagtcggcgcgccggccggggtggacgacgactggatcacccgcaagaccggtatccggcagcgtcgctgggccgccgacgaccaggccacctcggacctggccacggccgcggggcgggcagcgctgaaagcggcgggcatcacgcccgagcagctgaccgtgatcgcggtcgccacctccacgccggaccggccgcagccgcccacggcggcctatgtccagcaccacctcggtgcgaccggcactgcggcgttcgacgtcaacgcggtctgctccggcaccgtgttcgcgctgtcctcggtggcgggcaccctcgtgtaccggggcggttacgcgctggtcatcggcgcggacctgtactcgcgcatcctcaacccggccgaccgcaagacggtcgtgctgttcggggacggcgccggcgcaatggtcctcgggccgacctcgaccggcacgggccccatcgtccggcgcgtcgccctgcacaccttcggcggcctcaccgacctgatccgtgtgcccgcgggcggcagccgccagccgctggacacggatggcctcgacgcgggactgcagtacttcgcgatggacgggcgtgaggtgcgccgcttcgtcacggagcacctgccgcagctgatcaagggcttcctgcacgaggccggggtcgacgccgccgacatcagccacttcgtgccgcatcaggccaacggtgtcatgctcgacgaggtcttcggcgagctgcatctgccgcgggcgaccatgcaccggacggtcgagacctacggcaacacgggagcggcctccatcccgatcaccatggacgcggccgtgcgcgccggttccttccggccgggcgagctggtcctgctggccgggttcggcggcggcatggccgcgagcttcgccctgatcgagtggtagtagggaggtctgtttaatgaaaaaggtatgtgttataggtgcaggtactatgggttcaggaattgctcaggcatttgcagctaaaggatttgaagtagtattaagagatattaaagatgaatttgttgatagaggattagattttatcaataaaaatctttctaaattagttaaaaaaggaaagatagaagaagctactaaagttgaaatcttaactagaatttccggaacagttgaccttaatatggcagctgattgcgatttagttatagaagcagctgttgaaagaatggatattaaaaagcagatttttgctgacttagacaatatatgcaagccagaaacaattcttgcatcaaatacatcatcactttcaataacagaagtggcatcagcaactaaaagacctgataaggttataggtatgcatttctttaatccagctcctgttatgaagcttgtagaggtaataagaggaatagctacatcacaagaaacttttgatgcagttaaagagacatctatagcaataggaaaagatcctgtagaagtagcagaagcaccaggatttgttgtaaatagaatattaataccaatgattaatgaagcagttggtatattagcagaaggaatagcttcagtagaagacatagataaagctatgaaacttggagctaatcacccaatgggaccattagaattaggtgattttataggtcttgatatatgtcttgctataatggatgttttatactcagaaactggagattctaagtatagaccacatacattacttaagaagtatgtaagagcaggatggcttggaagaaaatcaggaaaaggtttctacgattattcaaaataagtttacaagaatccctttaggaggattagtcatggaactaaacaatgtcatccttgaaaaggaaggtaaagttgctgtagttaccattaacagacctaaagcattaaatgcgttaaatagtgatacactaaaagaaatggattatgttataggtgaaattgaaaatgatagcgaagtacttgcagtaattttaactggagcaggagaaaaatcatttgtagcaggagcagatatttctgagatgaaggaaatgaataccattgaaggtagaaaattcgggatacttggaaataaagtgtttagaagattagaacttcttgaaaagcctgtaatagcagctgttaatggttttgctttaggaggcggatgcgaaatagctatgtcttgtgatataagaatagcttcaagcaacgcaagatttggtcaaccagaagtaggtctcggaataacacctggttttggtggtacacaaagactttcaagattagttggaatgggcatggcaaagcagcttatatttactgcacaaaatataaaggcagatgaagcattaagaatcggacttgtaaataaggtagtagaacctagtgaattaatgaatacagcaaaagaaattgcaaacaaaattgtgagcaatgctccagtagctgttaagttaagcaaacaggctattaatagaggaatgcagtgtgatattgatactgctttagcatttgaatcagaagcatttggagaatgcttttcaacagaggatcaaaaggatgcaatgacagctttcatagagaaaagaaaaattgaaggcttcaaaaatagataggctcagctagcacccggaattgtgagcggataacaattccttggaattgtgagcggataacaattataattaagttgttaggaggttagaatgactcagcgcattgcgtatgtgaccggcggcatgggtggtatcggaaccgccatttgccagcggctggccaaggatggctttcgtgtggtggccggttgcggccccaactcgccgcgccgcgaaaagtggctggagcagcagaaggccctgggcttcgatttcattgcctcggaaggcaatgtggctgactgggactcgaccaagaccgcattcgacaaggtcaagtccgaggtcggcgaggttgatgtgctgatcaacaacgccggtatcacccgcgacgtggtgttccgcaagatgacccgcgccgactgggatgcggtgatcgacaccaacctgacctcgctgttcaacgtcaccaagcaggtgatcgacggcatggccgaccgtggctggggccgcatcgtcaacatctcgtcggtgaacgggcagaagggccagttcggccagaccaactactccaccgccaaggccggcctgcatggcttcaccatggcactggcgcaggaagtggcgaccaagggcgtgaccgtcaacacggtctctccgggctatatcgccaccgacatggtcaaggcgatccgccaggacgtgctcgacaagatcgtcgcgacgatcccggtcaagcgcctgggcctgccggaagagatcgcctcgatctgcgcctggttgtcgtcggaggagtccggtttctcgaccggcgccgacttctcgctcaacggcggcctgcatatgggctgaacaggaggcaataaatgagcgcacaatccctggaagtaggccagaaggcccgtctcagcaagcggttcggggcggcggaggtagccgccttcgccgcgctctcggaggacttcaaccccctgcacctggacccggccttcgccgccaccacggcgttcgagcggcccatagtccacggcatgctgctcgccagcctcttctccgggctgctgggccagcagttgccgggcaaggggagcatctatctgggtcaaagcctcagcttcaagctgccggtctttgtcggggacgaggtgacggccgaggtggaggtgaccgcccttcgcgaggacaagcccatcgccaccctgaccacccgcatcttcacccaaggcggcgccctcgccgtgacgggggaagccgtggtcaagctgccttaagttgaggaggtagataatgtctacaacacataacgtccctcagggcgatcttgttttacgtactttagccatgcccgccgataccaatgccaatggtgacatctttggtggttggttaatgtcacaaatggatattggcggcgctattctggcaaaagaaattgcccacggtcgcgtagtgactgtgcgggttgaaggaatgactttcttacggccggttgcggtcggcgatgtggtgtgctgctatgcacgctgtgtccagaaagggacgacatcggtcagcattaatattgaagtgtgggtgaaaaaagtagcgtctgaaccaatcgggcaacggtataaagcgacagaagcattatttaagtatgtcgcggttgatcctgaaggaaaacctcgcgccttacctgttgagtaaaaaggagtgtatataaatggagaattgtgaaatttgtactttggaaactgcttggtgtcaagggtgcgggaattttaatatactttcttctttaaaagaatcccttacggagcttaagttaaatccccatcaagttttaattgtaggaggaatagggcaagcagctaaaacgccacaatatataaatactaatggtttctgtggactccatggaagggcacttcctcctgctgttggtgctaaaatagcaaataaggatttaacagtaataattgatacaggagatggagatgcctatggcgagggaggaaaccattttattcataatataagaaggaatgttgatataacggagtttgttcatgataatcaaatttatggtcttactaaaggtcaagcttctccaacaacggatattgggcatgttacagaagttcaaccttatggttctaacaatgtacctttaaatcctgtacttttagctattacacttggggctggttttgttgcaagagcatttagcggtgataaaaatcatcttaaggagataatgaaacaggccataaactataaaggatattctttagtggatatacttcagccttgcgtaagttttaataagattaatacctttaaatggtatatggatagagtttataaattagataataactatgatccttcaaataaaataaaagcaatggagaaggcaatggaatggggagataaaattcctataggtattctatacaaggacgagaataaaaaagagttcagcgagaatttagaatttttaaagaaagaaaaaccactagtttatagtgaaataaaaattgataaaataaaaaattttcttgaggaattcagataaatcatcagggaggatcacatgatttataatattttgattggaggagctgcaggacagggaatggaaactttagcagctatacttcaaaaaattttaaagaaaaaaggttttgagatatttacaacacaggattacatgtcacgagtaagaggaggacataatttttttcaaattagatttggaaatgaagaaatacgtacccatgtaaaggaaattgatggaataatagcacttgatctaagtaccattgaacttcatataaatgagttaaagaaagatggatttgtaatttgtgataattctattaaatatgaagataaaagagtttatgctctacctttaagagatattgctcataaaataggtaatgttagggtatatggtagtgttgctttgggtgctttattgaaattatttaatcaggatttagcctttgcttttgatgttcttaatgttaggtttaaagaggatattgcgcaaaagaattttaatgcttttgaggaaggctttaaaaaagttgtacctaagtatgatataaagccaaaagaaaaagatgataagcttctaataaatgcaaatcaggcaattgctttaggcgcacttgcagcaggatgtaaattttattcagcttatcctatgacaccatcaactagtataatggactatttggcttccaaaatgaaggaagcaggtattgtagtggaacaggcagaggatgaaatagctgcaatcaatatggcaattggagcatcgtttactggaacaagagcaatgacaggtacttcaggaggaggttttgcactaatggttgaagctattggcctttcaagtatgcttgaggtacctcttgtggttgcagaaatacaaagaccaggaccaactacagggcttccaactagaacagagcagggagatcttaaatttgttatatcttcatcaccaggagatgttcctaagatggtaatagcattaaaaaatgcagaagatgctttctatcaaactatgagagcctttaatattgcagataaatatcaaatacctgtaataatactaggggatcaatatattgcagataacaatagaactgttagagaatttgattttgacaaaattaaagtaaataggtatttaagtgatgaagattttaaggaaaatagagagtataagagatatgaagtaacaaagacaggtgtttcacctagaataataccaggaaatattgaaggtaagacagttttagtggatagcgatgagcatgatgagtatggacatataacagaatcgtctgaaaccagagtattaatgaacgataagagaattagaaaaatgaaacacttaaaagaggaattaattgaaccagagtattttggtgaagacgcagcagaaaatattcttattggttggggatctttagaaggagcaataaaagaggcagttaatgatttaaataaagagggaaaagaaaaatatgcagctctcatatttggagatgtttggcctcttccagaaaagcttttaagagaaaaagcctcaaaagctaagacattaatagatgttgaacaaaatgctcaaggtcagctcgcagatattataagagaaggtactggaatagaagttgacaaaaagattttaaaatacgatggaaggcccattatggcttcatatatagtaggaagaataaaggagggtgagtaaatacataggaggaactacatggcaaaaaagttgaaaaccatggatggaaatgaagctgcagcttacgcttcttatgcctttacagatgtagctgcaatttatcctataacaccatccactccaatggcagagctagttgataactggtcatctcatggaagaaaaaacatcttcgggcagcctgttaaaatagttgaaatgcaatcagaggctggtgcagctggaactgttcacggttccttgattgcaggtgcacttacaactacatacactgcttctcaaggtcttcttttaatgataccaaacatgtataaaatggctggagaacttctaccctgcgtattccatgtaagtgctcgtgctattgcaactcacgctttatctatatttggagaccatcaggacgtcatggctgcaagacaaacaggttttgttctcttagcctcttcaaacgttcaagaggtcatggatttagctatggtatcacacttagctgctattaaagcaagagtgccattcatgcacttctttgacggttttagaacatcacatgaatatcaaaaaatagaaatgattgattacaatgatgtagctcctctagttgactacgaatcaattaaggcttttaggtctagagctcttaacccagaacatcctactgttcgtggtacagctcaaaatcctgatatctacttccagggcagagaagcttcaaacaatttctacactgcagttcctgatatcgtagaaagctatatgagagaaatagaaaagataactggaagagtatatcatccttttgattactatggcgaccctgaagcagaggatataattattgccatgggttcagtttgtgatacagttgaggaaactgtagattatttaaggagtaagggacaaaaagttggattgttgaaggttcatttatatagaccattctctactgactacttctttaaatatcttcctaaaactattaaaagaattgcagttctagacagaacaaaggaacctggttcagccggagaacctctttatctagatgtagttaatgccttttataaccatccaaataaacctgtcatagttggaggacgttttggtttaggttctaaagacacacgaccatcacaaattttatctgtatttgataacttaagagctcaaagccctaaaaatagatttaccattggaattgtggatgatgtttcaaatacatctctacctgaaggtgaaataatcgatactacacctcaaggaactataagatgtaaattctatggtttaggctctgatggtacagttggtgcaaacaaaagtgctataaaaatcataggtgataataccgatatgtactgtcaggcttacttctcctatgacagtaaaaagtctggaggaagtactgtttctcacttaagattcggaaataaacctattaaatccccttatcttgtttatgaagcagactacattgcctgccacaataaatcctttatatataatataaatgtgttaaaaggattaaagaagaacggaatttttgttctcaactgtccatttaaagataacgaacttgatgaacatcttcctaatgcaatgaaaaaatatattgcagacaacaacatacaattttacaccatagacgcagtttcaatagctcaagaggtaggtcttggttctagaataaacatgattatgcagtctgctttctttaaactagctaacataataccagtggataaggctgttcagtatttgaaagattctatagaatacacttacggtaaaaaaggtgctactatagttgatgcaaataaaaaagctgtagatgccggagttaacgcagctcacaaagttactgttcctgaagcctggaaaaatgctgaatccaactatcaacctttaaaaggtcttcccgatttcgttcaaagaattgaaagacctatggcaaggcatgaaggtgacgaactacctgtaagtgcttttaaaggcatggaagatggtgtatttcctcttggtataaccgcttatgaaaagcgtggaattgcagttaacgtcccagaatggcaaatagacaaatgtattcaatgtaaccagtgtgcatatgtttgtcctcacagtgtaataagagcttgtttacttgatgatgaggaaaaagaaaatgctcctgaaagattcgttaccaagaagcctgtaggtaaaggcctcgaacacctacactacaaaatccaaataagtccacttgactgtactggttgcggaaattgtgcggatatatgtcctgctccaggtaaagctttaattatgaagcctgctgcagaacaaatagaagaacaatcagaaaacttcgaatatgccttaaaggtaaaacctaaggaaggtataatggatattcatactgtaaagggaagtcaattttctagaccacttctagaatttaacggagcttgtcccggctgtggtgaaacaccttatattaaactattaacacagctttatggagatagaatgatgatagcaaacgctactggatgctcatctatttggggtgcaagtgcaccttcaattgcatacaccacaaataacttcggaaaaggtccttcttggggtaactcattatttgaggataatgcagagtacggttacggaatgtttttaggcgttaagcaaatgagagaaagattggctgaactaatggaagaagctattaattcaaatataaattctgatcttaaggatgcttttagcttgtggctagatggctttgatgacggcgataaatccaaggaagcatcaaataaaatccttagaatcatggaaaacgaggacttcaagggtgataaattattatctgaaatatatgataagaaagattatttagttaagaaatcccactggttaattggaggagacggttgggcatatgatataggcttcggcggagtagatcaagtgcttgctttaggtgatgatgtaaatatatttgtaatggatactgaaatatactctaatactggtggtcaatcctcaaaatccacaccaactggagcaattgcaaaattcgcttcagcaggtaaaaaaacacgaaaaaaagatcttggcttaatggctatgacttatggaaatgtctatgtaactcaaatagctatgggagcaaacatgacccacactattaaagcaattactgaagccgaagcctacaaaggtccttctttagtaatagcttatgcaccatgtataagccacggtattaaaactggtatgggcaccagcatagctcaagagaaaaaagctgttgaagcaggatactggcatttatacagatacaatcctcttctaaaagagcagggaaaaaatccatttatacttgattcaaaagagccaacagaatcctatacagactttataaatggagaacttcgttactcttcacttaagactatcttccctgataaggttgaagatgcatttaataagtcagcagaaaatgcaaaggaaagatactctctttataaaaaattatcagaattacagtaaactagcaggaggatctaatgtctaacgtgcaggagtggcaacagcttgccaacaaggaattgagccgtcgggagaaaactgtcgactcgctggttcatcaaaccgcggaagggatcgccatcaagccgctgtataccgaagccgatctcgataatctggaggtgacaggtacccttcctggtttgccgccctacgttcgtggcccgcgtgccactatgtataccgcccaaccgtggaccatccgtcagtatgctggtttttcaacagcaaaagagtccaacgctttttatcgccgtaacctggccgccgggcaaaaaggtctttccgttgcgtttgaccttgccacccaccgtggctacgactccgataacccgcgcgtggcgggcgacgtcggcaaagcgggcgtcgctatcgacaccgtggaagatatgaaagtcctgttcgaccagatcccgctggataaaatgtcggtttcgatgaccatgaatggcgcagtgctaccagtactggcgttttatatcgtcgccgcagaagagcaaggtgttacacctgataaactgaccggcaccattcaaaacgatattctcaaagagtacctctgccgcaacacctatatttacccaccaaaaccgtcaatgcgcattatcgccgacatcatcgcctggtgttccggcaacatgccgcgatttaataccatcagtatcagcggttaccacatgggtgaagcgggtgccaactgcgtgcagcaggtagcatttacgctcgctgatgggattgagtacatcaaagcagcaatctctgccggactgaaaattgatgacttcgctcctcgcctgtcgttcttcttcggcatcggcatggatctgtttatgaacgtcgccatgttgcgtgcggcacgttatttatggagcgaagcggtcagtggatttggcgcacaggacccgaaatcactggcgctgcgtacccactgccagacctcaggctggagcctgactgaacaggatccgtataacaacgttatccgcaccaccattgaagcgctggctgcgacgctgggcggtactcagtcactgcataccaacgcctttgacgaagcgcttggtttgcctaccgatttctcagcacgcattgcccgcaacacccagatcatcatccaggaagaatcagaactctgccgcaccgtcgatccactggccggatcctattacattgagtcgctgaccgatcaaatcgtcaaacaagccagagctattatccaacagatcgacgaagccggtggcatggcgaaagcgatcgaagcaggtctgccaaaacgaatgatcgaagaggcctcagcgcgcgaacagtcgctgatcgaccagggcaagcgtgtcatcgttggtgtcaacaagtacaaactggatcacgaagacgaaaccgatgtacttgagatcgacaacgtgatggtgcgtaacgagcaaattgcttcgctggaacgcattcgcgccacccgtgatgatgccgccgtaaccgccgcgttgaacgccctgactcacgccgcacagcataacgaaaacctgctggctgccgctgttaatgccgctcgcgttcgcgccaccctgggtgaaatttccgatgcgctggaagtcgctttcgaccgttatctggtgccaagccagtgtgttaccggcgtgattgcgcaaagctatcatcagtctgagaaatcggcctccgagttcgatgccattgttgcgcaaacggagcagttccttgccgacaatggtcgtcgcccgcgcattctgatcgctaagatgggccaggatggacacgatcgcggcgcgaaagtgatcgccagcgcctattccgatctcggtttcgacgtagatttaagcccgatgttctctacacctgaagagatcgcccgcctggccgtagaaaacgacgttcacgtagtgggcgcatcctcactggctgccggtcataaaacgctgatcccggaactggtcgaagcgctgaaaaaatggggacgcgaagatatctgcgtggtcgcgggtggcgtcattccgccgcaggattacgccttcctgcaagagcgcggcgtggcggcgatttatggtccaggtacacctatgctcgacagtgtgcgcgacgtactgaatctgataagccagcatcatgattaaacgataggaggactacatgtcttatcagtatgttaacgttgtcactatcaacaaagtggcggtcattgagtttaactatggccgaaaacttaatgccttaagtaaagtctttattgatgatcttatgcaggcgttaagcgatctcaaccggccggaaattcgctgtatcattttgcgcgcaccgagtggatccaaagtcttctccgcaggtcacgatattcacgaactgccgtctggcggtcgcgatccgctctcctatgatgatccattgcgtcaaatcacccgcatgatccaaaaattcccgaaaccgatcatttcgatggtggaaggtagtgtttggggtggcgcatttgaaatgatcatgagttccgatctgatcatcgccgccagtacctcaaccttctcaatgacgcctgtaaacctcggcgtcccgtataacctggtcggcattcacaacctgacccgcgacgcgggcttccacattgtcaaagagctgatttttaccgcttcgccaatcaccgcccagcgcgcgctggctgtcggcatcctcaaccatgttgtggaagtggaagaactggaagatttcaccttacaaatggcgcaccacatctctgagaaagcgccgttagccattgccgttatcaaagaagagctgcgtgtactgggcgaagcacacaccatgaactccgatgaatttgaacgtattcaggggatgcgccgcgcggtgtatgacagcgaagattaccaggaagggatgaacgctttcctcgaaaaacgtaaacctaatttcgttggtcattaacttacaggaggatcacaagatgacgcgtgaagtggtagtggtaagcggtgtccgtaccgcgatcgggacctttggcggcagcctgaaggatgtggcaccggcggagctgggcgcactggtggtgcgcgaggcgctggcgcgcgcgcaggtgtcgggcgacgatgtcggccacgtggtattcggcaacgtgatccagaccgagccgcgcgacatgtatctgggccgcgtcgcggccgtcaacggcggggtgacgatcaacgcccccgcgctgaccgtgaaccgcctgtgcggctcgggcctgcaggccattgtcagcgccgcgcagaccatcctgctgggcgataccgacgtcgccatcggcggcggcgcggaaagcatgagccgcgcaccgtacctggcgccggcagcgcgctggggcgcacgcatgggcgacgccggcctggtcgacatgatgctgggtgcgctgcacgatcccttccatcgcatccacatgggcgtgaccgccgagaatgtcgccaaggaatacgacatctcgcgcgcgcagcaggacgaggccgcgctggaatcgcaccgccgcgcttcggcagcgatcaaggccggctacttcaaggaccagatcgtcccggtggtgagcaagggccgcaagggcgacgtgaccttcgacaccgacgagcacgtgcgccatgacgccaccatcgacgacatgaccaagctcaggccggtcttcgtcaaggaaaacggcacggtcacggccggcaatgcctcgggcctgaacgacgccgccgccgcggtggtgatgatggagcgcgccgaagccgagcgccgcggcctgaagccgctggcccgcctggtgtcgtacggccatgccggcgtggacccgaaggccatgggcatcggcccggtgccggcgacgaagatcgcgctggagcgcgccggcctgcaggtgtcggacctggacgtgatcgaagccaacgaagcctttgccgcacaggcgtgcgccgtgaccaaggcgctcggtctggacccggccaaggttaacccgaacggctcgggcatctcgctgggccacccgatcggcgccaccggtgccctgatcacggtgaaggcgctgcatgagctgaaccgcgtgcagggccgctacgcgctggtgacgatgtgcatcggcggcgggcagggcattgccgccatcttcgagcgtatctgaaactacaggaggatcatatggaaaactttatcggaagccacatgatttatacgtatgaaaacggatgggaatacgagatttatattaaaaacgaccatacaattgattatagaattcatagcggaatggttgccggacgctgggttcgagatcaggaagtgaatattgtcaaactgacagaaggcgtatataaagtgtcttggacagagccgactggcacggatgtttcattaaactttatgccaaatgaaaaacgcatgcatggcattattttcttcccgaaatgggtgcatgaacatcctgaaattacggtttgctaccaaaatgaccacattgatttgatgaaagaatcccgcgaaaaatatgaaacgtatccaaaatacgttgtacctgaatttgcggaaattacatttctgaaaaatgaaggagtcgacaacgaagaagtgatttcgaaggctccttatgagggaatgacagacgatattcgcgcgggaagattataactatcataaaaataagaagcctgcatttgcaggcttcttatttttat

SEQ ID NO: 52 - DNA, 17407 bp, artificial sequence
  plasmid SG882
agtgagcaataaaaataagaagcctgcatttgcaggcttcttatttttatagaccggggacttatcagccaacctgtaggccagcaaaaggccaggaaccgtaaaaaggccgcgttgctggcgtttttccataggctccgcccccctgacgagcatcacaaaaatcgacgctcaagtcagaggtggcgaaacccgacaggactataaagataccaggcgtttccccctggaagctccctcgtgcgctctcctgttccgaccctgccgcttaccggatacctgtccgcctttctcccttcgggaagcgtggcgctttctcatagctcacgctgtaggtatctcagttcggtgtaggtcgttcgctccaagctgggctgtgtgcacgaaccccccgttcagcccgaccgctgcgccttatccggtaactatcgtcttgagtccaacccggtaagacacgacttatcgccactggcagcagccactggtaacaggattagcagagcgaggtatgtaggcggtgctacagagttcttgaagtggtggcctaactacggctacactagaagaacagtatttggtatctgcgctctgctgaagccagttaccttcggaaaaagagttggtagctcttgatccggcaaacaaaccaccgctggtagcggtggtttttttgtttgcaagcagcagattacgcgcagaaaaaaaggatctcaagaagatcctttgatcttttctacggggtctgacgctcagtggaacgaaaactcacgttaagggattttggtcatgagattatcaaaaaggatcttcacctagatccttttaaattaaaaatgaagttttaaatcaatctaaagtatatatgagtaaacttggtctgacagactcttcctttttcaatattattgaagcatttatcagggttattgtctcatgagcggatacatatttgaatgtatttagaaaaataaacaaataggggttccgcgcacatttccccgaaaagtgccacctgacggtcctgcaggtaatacgactcactatagggataacttaaatttatattttttactttataatatataattgattatagaatccaaattagataggaggaccaggtaaatggagaataattttattgtcaacgaaaacgagaaaagggttttaaagcagatatttaacaactccaatatcagtagaactcaaatttccaagaatttagaactgaataaagcaacaatttcgaacattcttaacaatctaaagcataaaagtttggtaaatgaagttggtgaaggaaattctactaaaagtggtggaagaaaacctatacttctcgaaattaatcaaaagtatgggtattatataagcatggatttgacatatgattctgttgagttaatgtataactattttgatgctacaattctcaaacaagatagttatgaactgaatgataagaatgtaagtagcatattacagatactcaaatctaacataaatgttagcgaaaaatacgacacattatacggtttattagggataagtatatccatacatgggattgtagatgatgaacaaaacatcattaatctaccatttcacaagaatgaaaaaagaacgtttactgatgaacttaagtctttcactaatgtaccagtggttattgaaaatgaggcaaatttaagtgcattatacgagaaaagtttatacatcaattcgaatattaacaacttgatcacattgtctatacataaaggtataggagctggcatcataatcaataagaaactctatagaggtagtaatggagaagctggagaaataggaaagactcttgttttagagtctatcaataacaatgataacaagtactataaaatagaggatatttgtagtcaagacgctttgatacaaaagattaataacagattaggagttacacttacatttaccgaactaatacagtattataacgaaggaaatagtattgtagctcatgaaatcaaacagtttatcaacaaaatgactgtcttaatacacaatcttaatactcagtttaatccagatgcaatatacatcaattgtcccttgattaatgaacttcctaatattctaaacgaaatcaaagaacaattctcttgtttttcacaaggaagtcctatacaattgcatttaaccactaatgttaaacaagctacattattaggtggaacattagcaattatgcagaaaacccttaacataaacaatatccaaatgaatattaaatagttacagcagtctgagttataaaatagatatctcggaccgtctattcttccttatttgagtgggtaccaatgaaatctttcgagctaaatcgatttctggcccactcttttttattttttagtaagcgtttacaaaaaatgaacaatgtgctatattacctctaaagttagtttgtttattaaattaaccaactaaaatgtcgggatccttactgcaataggttgctactgttttatcatgaatcatcaacgaatgtattttgcatatttcagtatctttaataaactctttgcaatttttacaagttttcatatacgcccttcttttcataaattaatttatgaattctatgtattccaaggagcttttggatccaattaggaggaatctgcgatggaaaaaaaggaatttcgtgttttgataaaatactgttttctgaagggaaaaaatacggtggaagcaaaaacttggcttgataatgagtttccggactctgccccagggaaatcaacaataattgattggtatgcaaaattcaagcgtggtgaaatgagcacggaggacggtgaacgcagtggacgcccgaaagaggtggttaccgacgaaaacatcaaaaaaatccacaaaatgattttgaatgaccgtaaaatgaagttgatcgagatagcagaggccttaaagatatcaaaggaacgtgttggtcatatcattcatcaatatttggatatgcggaagctctgtgcaaaatgggtgccgcgcgagctcacatttgaccaaaaacaacaacgtgttgatgattctgagcggtgtttgcagctgttaactcgtaatacacccgagtttttccgtcgatatgtgacaatggatgaaacatggctccatcactacactcctgagtccaatcgacagtcggctgagtggacagcgaccggtgaaccgtctccgaagcgtggaaagactcaaaagtccgctggcaaagtaatggcctctgttttttgggatgcgcatggaataatttttatcgattatcttgagaagggaaaaaccatcaacagtgactattatatggcgttattggagcgtttgaaggtcgaaatcgcggcaaaacggccccacatgaagaagaaaaaagtgttgttccaccaagacaacgcaccgtgccacaagtcattgagaacgatggcaaaaattcatgaattgggcttcgaattgcttccccacccaccgtattctccagatctggcccccagcgactttttcttgttctcagacctcaaaaggatgctcgcagggaaaaaatttggctgcaatgaagaggtgatcgccgaaactgaggcctattttgaggcaaaaccgaaggagtactaccaaaatggtatcaaaaaattggaaggtcgttataatcgttgtatcgctcttgaagggaactatgttgaataagaattccttaattaaggagctcgataaaaataagaagcctgcatttgcaggcttcttatttttatggtcatagctgtttcctggcgcgccgccattatttttttgaacaattgacaattcatttcttattttttattaagtgatagtcaaaaggcataacagtgctgaatagaaagaaatttacagaaaagaaaattatagaatttagtatgattaattatactcatttatgaatgtttaattgaatacaaaaaaaaatacttgttatgtattcaattacgggttaaaatatagacaagttgaaaaatttaataaaaaaataagtcctcagctcttatatattaagctaccaacttagtatataagccaaaacttaaatgtgctaccaacacatcaagccgttagagaactctatctatagcaatatttcaaatgtaccgacatacaagagaaacattaactatatatattcaatttatgagattatcttaacagatataaatgtaaattgcaataagtaagatttagaagtttatagcctttgtgtattggaagcagtacgcaaaggcttttttatttgataaaaattagaagtatatttattttttcataattaatttatgaaaatgaaagggggtgagcaaagtgacagaggaaagcagtatcttatcaaataacaaggtattagcaatatcattattgactttagcagtaaacattatgacttttatagtgcttgtagctaagtagtacgaaagggggagctttaaaaagctccttggaatacatagaattcataaattaatttatgaaaagaagggcgtatatgaaaacttgtaaaaattgcaaagagtttattaaagatactgaaatatgcaaaatacattcgttgatgattcatgataaaacagtagcaacctattgcagtaaatacaatgagtcaagatgtttacataaagggaaagtccaatgtattaattgttcaaagatgaaccgatatggatggtgtgccataaaaatgagatgttttacagaggaagaacagaaaaaagaacgtacatgcattaaatattatgcaaggagctttaaaaaagctcatgtaaagaagagtaaaaagaaaaaataatttatttattaatttaatattgagagtgccgacacagtatgcactaaaaaatatatctgtggtgtagtgagccgatacaaaaggatagtcactcgcattttcataatacatcttatgttatgattatgtgtcggtgggacttcacgacgaaaacccacaataaaaaaagagttcggggtagggttaagcatagttgaggcaactaaacaatcaagctaggatatgcagtagcagaccgtaaggtcgttgtttaggtgtgttgtaatacatacgctattaagatgtaaaaatacggataccaatgaagggaaaagtataatttttggatgtagtttgtttgttcatctatgggcaaactacgtccaaagccgtttccaaatctgctaaaaagtatatcctttctaaaatcaaagtcaagtatgaaatcataaataaagtttaattttgaagttattatgatattatgtttttctattaaaataaattaagtatatagaatagtttaataatagtatatacttaatgtgataagtgtctgacagtgtcacagaaaggatgattgttatggattataagcggccggccagtgggcaagttgaaaaattcacaaaaatgtggtataatatctttgttcattagagcgataaacttgaatttgagagggaacttagatggtatttgaaaaaattgataaaaatagttggaacagaaaagagtattttgaccactactttgcaagtgtaccttgtacctacagcatgaccgttaaagtggatatcacacaaataaaggaaaagggaatgaaactatatcctgcaatgctttattatattgcaatgattgtaaaccgccattcagagtttaggacggcaatcaatcaagatggtgaattggggatatatgatgagatgataccaagctatacaatatttcacaatgatactgaaacattttccagcctttggactgagtgtaagtctgactttaaatcatttttagcagattatgaaagtgatacgcaacggtatggaaacaatcatagaatggaaggaaagccaaatgctccggaaaacatttttaatgtatctatgataccgtggtcaaccttcgatggctttaatctgaatttgcagaaaggatatgattatttgattcctatttttactatggggaaatattataaagaagataacaaaattatacttcctttggcaattcaagttcatcacgcagtatgtgacggatttcacatttgccgttttgtaaacgaattgcaggaattgataaatagttaacttcaggtttgtctgtaactaaaaacaagtatttaagcaaaaacatcgtagaaatacggtgttttttgttaccctaagtttactctatcattgatagagtgcgactctatcattgatagagtccacaggttggctgataagtccccggtctgtaccgttcgtataatgtatgctatacgaagttataggaggttataatgaacgagaaaaatataaaacacagtcaaaactttattacttcaaaacataatatagataaaataatgacaaatataagattaaatgaacatgataatatctttgaaatcggctcaggaaaagggcattttacccttgaattagtacagaggtgtaatttcgtaactgccattgaaatagaccataaattatgcaaaactacagaaaataaacttgttgatcacgataatttccaagttttaaacaaggatatattgcagtttaaatttcctaaaaaccaatcctataaaatatttggtaatataccttataacataagtacggatataatacgcaaaattgtttttgatagtatagctgatgagatttatttaatcgtggaatacgggtttgctaaaagattattaaatacaaaacgctcattggcattatttttaatggcagaagttgatatttctatattaagtatggttccaagagaatattttcatcctaaacctaaagtgaatagctcacttatcagattaaatagaaaaaaatcaagaatatcacacaaagataaacagaagtataattatttcgttatgaaatgggttaacaaagaatacaagaaaatatttacaaaaaatcaatttaacaattccttaaaacatgcaggaattgacgatttaaacaatattagctttgaacaattcttatctcttttcaatagctataaattatttaataagtaagttaagggatgcataaactgcatcccttaacttgtttttcgtgtacctattttttgtgaatcgattatgtcttttgcgcattcgtcgacaattgcatatattgataaaaataataatagtgggtataattaagttgttaggaggttagttagaatgagtagactcgataagtctaaagtgataaattccgcattagaactccttaatgaagttggaattgaaggtctaactaccaggaaattagctcagaaacttggagttgaacaaccaacattgtactggcatgtcaaaaacaaaagagcactcttagatgcattagcaatcgaaatgttagacagacatcatacacacttttgtccattagaaggtgaaagttggcaagactttttgaggaataacgcgaaaagtttcagatgtgctttactatcccatagagatggggctaaagttcacttaggaactagacctacagaaaagcagtatgagacacttgaaaatcagttggcatttctatgtcaacaaggattctcattagagaacgcattatatgctctttcagctgtaggtcatttcacgttaggttgtgttttggaagatcaagaacatcaagttgcaaaagaagagagagaaactcctactacagatagtatgccacctttattacgacaagctatagaactgtttgatcatcaaggagctgaacctgcgtttctctttggattggagttaataatttgcggactagagaaacagcttaagtgtgaaagtggatcttagttagcaccggtcagggtggtgaatgtgaaaccagtaacgttatacgatgtcgcagagtatgccggtgtctcttatcagaccgtttcccgcgtggtgaaccaggccagccacgtttctgcgaaaacgcgggaaaaagtggaagcggcgatggcggagctgaattacattcccaaccgcgtggcacaacaactggcgggcaaacagtcgttgctgattggcgttgccacctccagtctggccctgcacgcgccgtcgcaaattgtcgcggcgattaaatctcgcgccgatcaactgggtgccagcgtggtggtgtcgatggtagaacgaagcggcgtcgaagcctgtaaagcggcggtgcacaatcttctcgcgcaacgcgtcagtgggctgatcattaactatccgctggatgaccaggatgccattgctgtggaagctgcctgcactaatgttccggcgttatttcttgatgtctctgaccagacacccatcaacagtattattttctcccatgaagacggtacgcgactgggcgtggagcatctggtcgcattgggtcaccagcaaatcgcgctgttagcgggcccattaagttctgtctcggcgcgtctgcgtctggctggctggcataaatatctcactcgcaatcaaattcagccgatagcggaacgggaaggcgactggagtgccatgtccggttttcaacaaaccatgcaaatgctgaatgagggcatcgttcccactgcgatgctggttgccaacgatcagatggcgctgggcgcaatgcgcgccattaccgagtccgggctgcgcgttggtgcggacatctcggtagtgggatacgacgataccgaagacagctcatgttatatcccgccgttaaccaccatcaaacaggattttcgcctgctggggcaaaccagcgtggaccgcttgctgcaactctctcagggccaggcggtgaagggcaatcagctgttgcccgtctcactggtgaaaagaaaaaccaccctggcgcccaatacgcaaaccgcctctccccgcgcgttggccgattcattaatgcagctggcacgacaggtttcccgactggaaagcgggcagtgagcgcaacgcaattaatgtaagttagctcactcattaggcaccgggatctcgaccgatgcccttgagagccttcaacccagtcagctccttccggtgggcgcggggcatgactagcatgatcgtgctcctgtcgttgaggacccggctaggctggcggggttgccttactggttagcagaatgaatcaccgatacgcgataacttcgtataatgtatgctatacgaacggtagctcagctagcacccggaattgtgagcggataacaattccttggaattgtgagcggataacaattataattaagttgttaggaggttagaatgaaaaattgtgtcatcgtcagtgcggtacgtactgctatcggtagttttaacggttcactcgcttccaccagcgccatcgacctgggggcgacagtaattaaagccgccattgaacgtgcaaaaatcgattcacaacacgttgatgaagtgattatgggtaacgtgttacaagccgggctggggcaaaatccggcgcgtcaggcactgttaaaaagcgggctggcagaaacggtgtgcggattcacggtcaataaagtatgtggttcgggtcttaaaagtgtggcgcttgccgcccaggccattcaggcaggtcaggcgcagagcattgtggcggggggtatggaaaatatgagtttagccccctacttactcgatgcaaaagcacgctctggttatcgtcttggagacggacaggtttatgacgtaatcctgcgcgatggcctgatgtgcgccacccatggttatcatatggggattaccgccgaaaacgtggctaaagagtacggaattacccgtgaaatgcaggatgaactggcgctacattcacagcgtaaagcggcagccgcaattgagtccggtgcttttacagccgaaatcgtcccggtaaatgttgtcactcgaaagaaaaccttcgtcttcagtcaagacgaattcccgaaagcgaattcaacggctgaagcgttaggtgcattgcgcccggccttcgataaagcaggaacagtcaccgctgggaacgcgtctggtattaacgacggtgctgccgctctggtgattatggaagaatctgcggcgctggcagcaggccttacccccctggctcgcattaaaagttatgccagcggtggcgtgccccccgcattgatgggtatggggccagtacctgccacgcaaaaagcgttacaactggcggggctgcaactggcggatattgatctcattgaggctaatgaagcatttgctgcacagttccttgccgttgggaaaaacctgggctttgattctgagaaagtgaatgtcaacggcggggccatcgcgctcgggcatcctatcggtgccagtggtgctcgtattctggtcacactattacatgccatgcaggcacgcgataaaacgctggggctggcaacactgtgcattggcggcggtcagggaattgcgatggtgattgaacggttgaattaagaggtaagtttataggaggaattccatatgatatggaaacggaaaatcaccctggaagcactgaatgctatgggtgaaggaaacatggtggggttcctggatattcgctttgaacatattggtgatgacacccttgaagcgacaatgccagtagactcgcggacaaagcagcctttcgggttgctgcatggaggagcatccgtggtactggccgaaagtatcggttccgttgccggttatttatgtaccgaaggtgagcaaaaagtggttggtctggaaatcaatgctaaccacgtccgctcggcacgagaagggcgggtgcgcggcgtatgcaaaccgttgcatctcggttcgcgtcaccaggtctggcagattgaaatcttcgatgagaaagggcgtttgtgctgttcgtcacgattgacgaccgccattttgtgaatttacacgatcgacgtgctcagctagcacccggaattgtgagcggataacaattccttggaattgtgagcggataacaattataattaagttgttaggaggttagaatgctcctatttccaagaagaactaatatagcctttttcaaaacaacaggcatttttgctaattttcctttgctaggtagaaccattacaacttcaccatctttccttacacataaactgtcaaaggaagtaaccagggcatcaacttcgcctccaagaccaaagagaattgttgtcgcaattactggtgcgactggtgttgcactgggaatcagacttctacaagtgctaaaagagttgagcgtagaaacccatttggtgatttcaaaatggggtgcagcaacaatgaaatatgaaacagattgggaaccgcatgacgtggcggccttggcaaccaagacatactctgttcgtgatgtttctgcatgcatttcgtccggatctttccagcatgatggtatgattgttgtgccctgttccatgaaatcactagctgctattagaatcggttttacagaggatttaattacaagagctgccgatgtttcgattaaagagaatcgtaagttactactggttactcgggaaacccctttatcttccatccatcttgaaaacatgttgtctttatgcagggcaggtgttataatttttcctccggtacctgcgttttatacaagacccaagagccttcatgacctattagaacaaagtgttggcaggatcctagactgctttggcatccacgctgacacttttcctcgttgggaaggaataaaaagcaagtaaactatcgaggaggatcaatgacgttaggaattgataaaatcaacttctatgtccccaaatattacgtggatatggcgaaattagcagaggcaagacaagttgatcccaacaagttcctcatcggtattggacagactgaaatggctgtttctcctgtcaatcaggacattgtaagtatgggtgcaaatgcagctaaggacataatcacagatgaggacaaaaagaaaatcggaatggtaatagtcgcaacagaatctgcagtagatgcagctaaagcagcagcagttcaaattcacaatttattagggattcaaccttttgcgagatgtttcgaaatgaaggaagcatgttatgctgcaactccagctatccaattggcaaaggactatctagctacaagacctaacgagaaagttttggtcatagctactgatactgctagatacggacttaactcaggaggtgaacctacacaaggtgcaggtgcagtagcaatggtcatatcccacaatcctagtatactcgcattaaacgaggatgcagttgcatatacggaagatgtgtacgacttttggagacctactggtcataagtaccctctagttgatggagctctttctaaggacgcttatatccgaagttttcaacagtcttggaatgagtatgcgaaaagacaaggcaaatccttagcagatttcgcaagtttatgcttccatgttcccttcactaaaatggggaaaaaagcgttagagtccatcatagataacgctgatgaaaccactcaagagagacttagatccggttatgaagatgctgtggactataaccgctatgttgggaacatttacacgggaagtttgtacctgtcactcatatccttgcttgagaatcgtgacttacaagcaggtgaaacgattggattgttctcgtatggaagtggtagtgtaggggagttttacagtgcgacgttagtagaaggctataaggaccatcttgatcaagctgcacataaagctctccttaataaccgtaccgaagttagtgtagatgcttacgagaccttctttaagaggtttgatgacgttgatttcgacgaacaacaagatgctgtacatgaagatcgtcatatcttctacctgagtaacatcgagaataacgtcagagagtaccatagaccagaatagacataggaggacgatatgagcgatttcagcaccctcgaagtgatccgcgacccgcgcggcttcgccaccctgtggttaagccgtgaggacaagaacaacgccttcaatgcgcagatgatccgcgagctgatcgtggccatcgaccagttggccgaagacgccagcctgcgctttgtgctgctgcgcggccgtggccggcacttcagcgccggtgccgacctggcctggatgcagcagtcggcgcaactggacttcaacaccaacctggatgatgcccacgaactgggcgagctgatgtacgccctgcatcgcctcaaggccccgaccctggccgtggtgcaaggtgcagcctttggcggcgcgctgggcctgatcagctgctgcgacatggccatcggcgccgaagacgcccaactgtgcctgtcggaagtacgcatcggcctggccccggcggtcatcagcccgttcgtggtcaaggccattggcgaacgcgccgcgcgccgctacgccctcaccgccgagcgtttcactggcgtgcgcgcacgcgagctgggcctgctggccgaggtgtacccggccagcgaactggacgaccacgtcgaagcctgggtaagcaacctgctgcagaacagcccgcaagcattgcgcgccaccaaggacttgctgcgcgaagtggacgacggcgaactcagcccggccctgcgccgttactgcgaaaacaccatcgcccgtatccgcgtcagcgccgaaggccaggagggcctgcgcgctttcctggaaaaacgccgccctgcctggcaaaccgttgacaagaaggagccgcgcccatgaactacgaggaggactacatgaacccggactaccgcagcatccagcgcctcctggtcgccaaccgcggcgagatcgcctgccgggtgatgcgcagcgcgcgcgccctcggcatcggcagcgtcgccgtgcacagcgacatcgaccgccacgcccgccacgtcgccgaagccgacatcgccgtcgacctgggcggcgccaagcccgccgacagctacctgcgcggcgacaggatcatcgcagctgccctcgccagcggcgcccaggcgatccaccccggctacggcttcctctcggagaacgccgacttcgcccgcgcctgcgaggaagccggcctgctcttcctcggaccgccggcggcggccatcgacgccatgggcagcaagtcggccgccaaggcgctgatggaagaagccggcgtgccgctggtgcccggctatcacggcgaagcccaggacctcgagactttccgccgggaagccgggcgcatcggctacccggtgctgctcaaggccgccgctggcggcggcggcaagggcatgaaggtggtggagcgcgaggccgagctggccgaggccctttcctccgcccagcgcgaggccaaggccgccttcggcgacgcgcgtatgctggtggagaaatacctgctgaagccgcgccacgtggagatccaggtattcgccgaccgccatggccactgcctgtacctcaacgaacgcgactgttcgatccagcgccgccaccagaaggtcgtcgaggaagcccccgcccccggtctcggcgcggaactgcgccgggccatgggcgaggccgcggtacgcgcggcgcaggcgatcggctacgtcggcgccggtaccgtcgaattcctcctcgacgaacgcggccagttcttcttcatggaaatgaacacccgcctgcaggtggaacacccggtcaccgaggccatcaccggcctcgacctggtcgcctggcagatccgcgtcgctcgcggcgaggcgctaccgctgacgcaggaacaggtaccgctgaacggccacgccatcgaagtacggctctatgcggaagaccccgagggcgacttcctccccgccagcggccgcctgatgctataccgcgaagcggccgccggccccggccggcgggtcgacagcggggtacgcgaaggcgacgaggtctcgccgttctacgacccgatgctggccaagctgatcgcctggggcgaaacccgcgaggaagcccgccagcgcctgctggcgatgctggcggaaacctcggtcggcggcctgcgcaccaacctggcgttcctccgccgcatcctcggccatccggcgttcgccgccgccgaactggacaccgggttcatcgcgcgccaccaagacgacctgctgccggcgccgcaagcgctgccggagcatttctggcaagccgccgccgaagcctggctgcagagcgaaccgggccaccgtcgcgacgacgacccgcattcgccgtggagccgcaacgacggctggcgcagcgccctggcgcgggagtccgacctgatgctgcgctgccgcgacgaacgccgctgcgtccgcctgcgccacgccagccccagccagtatcgcctcgacggcgacgacctggtcagccgggtggacggtgtcacccgtcgctcggcggcgttgcgccgcggacgccaattgttcctcgaatgggagggcgaactgctggccatcgaagccgtcgacccgatcgccgaggccgaggccgcccatgcccaccagggcggtttgagcgcgccgatgaacggcagtatcgtgcgggtcctggtcgagcccggccagacggtcgaagccggcgccaccctggtggtgctggaggcgatgaagatggaacacagcatccgcgcgccccacgccggggtagtgaaggcgctgtattgcagcgagggcgaactggtcgaggaaggcacgccgctggtggagctggacgagaaccaggcctgaacgtaaggaggattcaatggccatcctgcacacccagatcaatccacgctccgccgagttcgcggccaacgccgcgaccatgctggaacaggtcaacgccctgcgcaccctcctcggccgcatccacgaaggcggcggtagcgccgcccaggcccggcacagcgcgcgcggcaagctgctggtgcgcgaacgcatcaaccgcctgctcgaccccggctcgccgttcctcgagctttccgccctcgccgcccacgaagtctacggcgaagaggtcgccgccgccggcatcgtcgccgggatcggccgggtcgaaggggtggaatgcatgatcgtcggcaacgatgccacggtgaagggcggcacctactatccgctgaccgtgaagaagcacctgcgggcccaggccatcgccctggagaaccgcctgccatgcatctacctggtggactctggcggcgccaacctgccgcgccaggacgaggtgttccccgaccgcgagcacttcggccggatcttcttcaaccaggccaacatgagtgcccgcggcatcccgcagatcgccgtggtcatgggctcctgcaccgccggcggggcctacgtgccggcgatgtccgacgaaaccgtgatggtgcgcgaacaggccaccatcttcctcgccgggccgccgctggtgaaggccgctaccggcgaggtggtcagcgccgaggaacttggcggcgccgacgtgcactgcaaggtctcaggggtcgccgaccactatgccgaggacgatgaccatgccctggccatcgcccgccgctgcgtcgccaacctcaactggcgcaagcagggccagctgcaatgccgtgcaccgcgcgcgccgctgtaccccgccgaggagctgtacggggtgattcccgccgacagcaagcagccctacgacgtgcgcgaagtgatcgcacggctggtggacggctccgagttcgacgaattcaaggcgctgttcggcaccaccctggtctgcggcttcgcccacctgcacggctatccgatcgccatcctggccaacaacgggatcctcttcgccgaggccgcgcagaaaggcgcgcacttcatcgagttggcctgccagcgtggcatcccgctgctgttcctgcagaacatcaccggtttcatggtcggccagaagtacgaggctggcggcatcgccaagcacggcgccaagctggtgaccgcggtggcctgcgcgcgggtgccgaagttcaccgtgctgatcggcggcagcttcggcgccggcaactacggcatgtgcggacgcgcctacgacccgcgcttcctgtggatgtggccgaacgcgaggatcggcgtgatgggcggcgaacaggccgccggggtgctcgcccaggtcaagcgcgagcaggccgagcgcgccggccagcagctcggcgtcgaagaggaggcgaagatcaaggcgccgatcctcgagcagtacgagcaccagggccatccctactactccagcgcgcgactgtgggacgacggcgtgatcgatccggcgcagacccgcgaggtcctcgccctggcgctttccgccgccctcaacgcccccatcgagccgaccgccttcggcgtgttccgcatgtgatactatcataaaaataagaagcctgcatttgcaggcttcttatttttat

SEQ ID NO: 53 - DNA, 15495 bp, artificial sequence
  plasmid SG901
agtgagcaataaaaataagaagcctgcatttgcaggcttcttatttttatagaccggggacttatcagccaacctgtaggccagcaaaaggccaggaaccgtaaaaaggccgcgttgctggcgtttttccataggctccgcccccctgacgagcatcacaaaaatcgacgctcaagtcagaggtggcgaaacccgacaggactataaagataccaggcgtttccccctggaagctccctcgtgcgctctcctgttccgaccctgccgcttaccggatacctgtccgcctttctcccttcgggaagcgtggcgctttctcatagctcacgctgtaggtatctcagttcggtgtaggtcgttcgctccaagctgggctgtgtgcacgaaccccccgttcagcccgaccgctgcgccttatccggtaactatcgtcttgagtccaacccggtaagacacgacttatcgccactggcagcagccactggtaacaggattagcagagcgaggtatgtaggcggtgctacagagttcttgaagtggtggcctaactacggctacactagaagaacagtatttggtatctgcgctctgctgaagccagttaccttcggaaaaagagttggtagctcttgatccggcaaacaaaccaccgctggtagcggtggtttttttgtttgcaagcagcagattacgcgcagaaaaaaaggatctcaagaagatcctttgatcttttctacggggtctgacgctcagtggaacgaaaactcacgttaagggattttggtcatgagattatcaaaaaggatcttcacctagatccttttaaattaaaaatgaagttttaaatcaatctaaagtatatatgagtaaacttggtctgacagactcttcctttttcaatattattgaagcatttatcagggttattgtctcatgagcggatacatatttgaatgtatttagaaaaataaacaaataggggttccgcgcacatttccccgaaaagtgccacctgacggtcctgcaggtaatacgactcactatagggataacttaaatttatattttttactttataatatataattgattatagaatccaaattagataggaggaccaggtaaatggagaataattttattgtcaacgaaaacgagaaaagggttttaaagcagatatttaacaactccaatatcagtagaactcaaatttccaagaatttagaactgaataaagcaacaatttcgaacattcttaacaatctaaagcataaaagtttggtaaatgaagttggtgaaggaaattctactaaaagtggtggaagaaaacctatacttctcgaaattaatcaaaagtatgggtattatataagcatggatttgacatatgattctgttgagttaatgtataactattttgatgctacaattctcaaacaagatagttatgaactgaatgataagaatgtaagtagcatattacagatactcaaatctaacataaatgttagcgaaaaatacgacacattatacggtttattagggataagtatatccatacatgggattgtagatgatgaacaaaacatcattaatctaccatttcacaagaatgaaaaaagaacgtttactgatgaacttaagtctttcactaatgtaccagtggttattgaaaatgaggcaaatttaagtgcattatacgagaaaagtttatacatcaattcgaatattaacaacttgatcacattgtctatacataaaggtataggagctggcatcataatcaataagaaactctatagaggtagtaatggagaagctggagaaataggaaagactcttgttttagagtctatcaataacaatgataacaagtactataaaatagaggatatttgtagtcaagacgctttgatacaaaagattaataacagattaggagttacacttacatttaccgaactaatacagtattataacgaaggaaatagtattgtagctcatgaaatcaaacagtttatcaacaaaatgactgtcttaatacacaatcttaatactcagtttaatccagatgcaatatacatcaattgtcccttgattaatgaacttcctaatattctaaacgaaatcaaagaacaattctcttgtttttcacaaggaagtcctatacaattgcatttaaccactaatgttaaacaagctacattattaggtggaacattagcaattatgcagaaaacccttaacataaacaatatccaaatgaatattaaatagttacagcagtctgagttataaaatagatatctcggaccgtctattcttccttatttgagtgggtaccaatgaaatctttcgagctaaatcgatttctggcccactcttttttattttttagtaagcgtttacaaaaaatgaacaatgtgctatattacctctaaagttagtttgtttattaaattaaccaactaaaatgtcgggatccttactgcaataggttgctactgttttatcatgaatcatcaacgaatgtattttgcatatttcagtatctttaataaactctttgcaatttttacaagttttcatatacgcccttcttttcataaattaatttatgaattctatgtattccaaggagcttttggatccaattaggaggaatctgcgatggaaaaaaaggaatttcgtgttttgataaaatactgttttctgaagggaaaaaatacggtggaagcaaaaacttggcttgataatgagtttccggactctgccccagggaaatcaacaataattgattggtatgcaaaattcaagcgtggtgaaatgagcacggaggacggtgaacgcagtggacgcccgaaagaggtggttaccgacgaaaacatcaaaaaaatccacaaaatgattttgaatgaccgtaaaatgaagttgatcgagatagcagaggccttaaagatatcaaaggaacgtgttggtcatatcattcatcaatatttggatatgcggaagctctgtgcaaaatgggtgccgcgcgagctcacatttgaccaaaaacaacaacgtgttgatgattctgagcggtgtttgcagctgttaactcgtaatacacccgagtttttccgtcgatatgtgacaatggatgaaacatggctccatcactacactcctgagtccaatcgacagtcggctgagtggacagcgaccggtgaaccgtctccgaagcgtggaaagactcaaaagtccgctggcaaagtaatggcctctgttttttgggatgcgcatggaataatttttatcgattatcttgagaagggaaaaaccatcaacagtgactattatatggcgttattggagcgtttgaaggtcgaaatcgcggcaaaacggccccacatgaagaagaaaaaagtgttgttccaccaagacaacgcaccgtgccacaagtcattgagaacgatggcaaaaattcatgaattgggcttcgaattgcttccccacccaccgtattctccagatctggcccccagcgactttttcttgttctcagacctcaaaaggatgctcgcagggaaaaaatttggctgcaatgaagaggtgatcgccgaaactgaggcctattttgaggcaaaaccgaaggagtactaccaaaatggtatcaaaaaattggaaggtcgttataatcgttgtatcgctcttgaagggaactatgttgaataagaattccttaattaaggagctcgataaaaataagaagcctgcatttgcaggcttcttatttttatggtcatagctgtttcctggcgcgccgccattatttttttgaacaattgacaattcatttcttattttttattaagtgatagtcaaaaggcataacagtgctgaatagaaagaaatttacagaaaagaaaattatagaatttagtatgattaattatactcatttatgaatgtttaattgaatacaaaaaaaaatacttgttatgtattcaattacgggttaaaatatagacaagttgaaaaatttaataaaaaaataagtcctcagctcttatatattaagctaccaacttagtatataagccaaaacttaaatgtgctaccaacacatcaagccgttagagaactctatctatagcaatatttcaaatgtaccgacatacaagagaaacattaactatatatattcaatttatgagattatcttaacagatataaatgtaaattgcaataagtaagatttagaagtttatagcctttgtgtattggaagcagtacgcaaaggcttttttatttgataaaaattagaagtatatttattttttcataattaatttatgaaaatgaaagggggtgagcaaagtgacagaggaaagcagtatcttatcaaataacaaggtattagcaatatcattattgactttagcagtaaacattatgacttttatagtgcttgtagctaagtagtacgaaagggggagctttaaaaagctccttggaatacatagaattcataaattaatttatgaaaagaagggcgtatatgaaaacttgtaaaaattgcaaagagtttattaaagatactgaaatatgcaaaatacattcgttgatgattcatgataaaacagtagcaacctattgcagtaaatacaatgagtcaagatgtttacataaagggaaagtccaatgtattaattgttcaaagatgaaccgatatggatggtgtgccataaaaatgagatgttttacagaggaagaacagaaaaaagaacgtacatgcattaaatattatgcaaggagctttaaaaaagctcatgtaaagaagagtaaaaagaaaaaataatttatttattaatttaatattgagagtgccgacacagtatgcactaaaaaatatatctgtggtgtagtgagccgatacaaaaggatagtcactcgcattttcataatacatcttatgttatgattatgtgtcggtgggacttcacgacgaaaacccacaataaaaaaagagttcggggtagggttaagcatagttgaggcaactaaacaatcaagctaggatatgcagtagcagaccgtaaggtcgttgtttaggtgtgttgtaatacatacgctattaagatgtaaaaatacggataccaatgaagggaaaagtataatttttggatgtagtttgtttgttcatctatgggcaaactacgtccaaagccgtttccaaatctgctaaaaagtatatcctttctaaaatcaaagtcaagtatgaaatcataaataaagtttaattttgaagttattatgatattatgtttttctattaaaataaattaagtatatagaatagtttaataatagtatatacttaatgtgataagtgtctgacagtgtcacagaaaggatgattgttatggattataagcggccggccagtgggcaagttgaaaaattcacaaaaatgtggtataatatctttgttcattagagcgataaacttgaatttgagagggaacttagatggtatttgaaaaaattgataaaaatagttggaacagaaaagagtattttgaccactactttgcaagtgtaccttgtacctacagcatgaccgttaaagtggatatcacacaaataaaggaaaagggaatgaaactatatcctgcaatgctttattatattgcaatgattgtaaaccgccattcagagtttaggacggcaatcaatcaagatggtgaattggggatatatgatgagatgataccaagctatacaatatttcacaatgatactgaaacattttccagcctttggactgagtgtaagtctgactttaaatcatttttagcagattatgaaagtgatacgcaacggtatggaaacaatcatagaatggaaggaaagccaaatgctccggaaaacatttttaatgtatctatgataccgtggtcaaccttcgatggctttaatctgaatttgcagaaaggatatgattatttgattcctatttttactatggggaaatattataaagaagataacaaaattatacttcctttggcaattcaagttcatcacgcagtatgtgacggatttcacatttgccgttttgtaaacgaattgcaggaattgataaatagttaacttcaggtttgtctgtaactaaaaacaagtatttaagcaaaaacatcgtagaaatacggtgttttttgttaccctaagtttactctatcattgatagagtgcgactctatcattgatagagtccacaggttggctgataagtccccggtctgtaccgttcgtataatgtatgctatacgaagttataggaggttataatgaacgagaaaaatataaaacacagtcaaaactttattacttcaaaacataatatagataaaataatgacaaatataagattaaatgaacatgataatatctttgaaatcggctcaggaaaagggcattttacccttgaattagtacagaggtgtaatttcgtaactgccattgaaatagaccataaattatgcaaaactacagaaaataaacttgttgatcacgataatttccaagttttaaacaaggatatattgcagtttaaatttcctaaaaaccaatcctataaaatatttggtaatataccttataacataagtacggatataatacgcaaaattgtttttgatagtatagctgatgagatttatttaatcgtggaatacgggtttgctaaaagattattaaatacaaaacgctcattggcattatttttaatggcagaagttgatatttctatattaagtatggttccaagagaatattttcatcctaaacctaaagtgaatagctcacttatcagattaaatagaaaaaaatcaagaatatcacacaaagataaacagaagtataattatttcgttatgaaatgggttaacaaagaatacaagaaaatatttacaaaaaatcaatttaacaattccttaaaacatgcaggaattgacgatttaaacaatattagctttgaacaattcttatctcttttcaatagctataaattatttaataagtaagttaagggatgcataaactgcatcccttaacttgtttttcgtgtacctattttttgtgaatcgattatgtcttttgcgcattcgtcgacaattgcatatattgataaaaataataatagtgggtataattaagttgttaggaggttagttagaatgagtagactcgataagtctaaagtgataaattccgcattagaactccttaatgaagttggaattgaaggtctaactaccaggaaattagctcagaaacttggagttgaacaaccaacattgtactggcatgtcaaaaacaaaagagcactcttagatgcattagcaatcgaaatgttagacagacatcatacacacttttgtccattagaaggtgaaagttggcaagactttttgaggaataacgcgaaaagtttcagatgtgctttactatcccatagagatggggctaaagttcacttaggaactagacctacagaaaagcagtatgagacacttgaaaatcagttggcatttctatgtcaacaaggattctcattagagaacgcattatatgctctttcagctgtaggtcatttcacgttaggttgtgttttggaagatcaagaacatcaagttgcaaaagaagagagagaaactcctactacagatagtatgccacctttattacgacaagctatagaactgtttgatcatcaaggagctgaacctgcgtttctctttggattggagttaataatttgcggactagagaaacagcttaagtgtgaaagtggatcttagttagcaccggtcagggtggtgaatgtgaaaccagtaacgttatacgatgtcgcagagtatgccggtgtctcttatcagaccgtttcccgcgtggtgaaccaggccagccacgtttctgcgaaaacgcgggaaaaagtggaagcggcgatggcggagctgaattacattcccaaccgcgtggcacaacaactggcgggcaaacagtcgttgctgattggcgttgccacctccagtctggccctgcacgcgccgtcgcaaattgtcgcggcgattaaatctcgcgccgatcaactgggtgccagcgtggtggtgtcgatggtagaacgaagcggcgtcgaagcctgtaaagcggcggtgcacaatcttctcgcgcaacgcgtcagtgggctgatcattaactatccgctggatgaccaggatgccattgctgtggaagctgcctgcactaatgttccggcgttatttcttgatgtctctgaccagacacccatcaacagtattattttctcccatgaagacggtacgcgactgggcgtggagcatctggtcgcattgggtcaccagcaaatcgcgctgttagcgggcccattaagttctgtctcggcgcgtctgcgtctggctggctggcataaatatctcactcgcaatcaaattcagccgatagcggaacgggaaggcgactggagtgccatgtccggttttcaacaaaccatgcaaatgctgaatgagggcatcgttcccactgcgatgctggttgccaacgatcagatggcgctgggcgcaatgcgcgccattaccgagtccgggctgcgcgttggtgcggacatctcggtagtgggatacgacgataccgaagacagctcatgttatatcccgccgttaaccaccatcaaacaggattttcgcctgctggggcaaaccagcgtggaccgcttgctgcaactctctcagggccaggcggtgaagggcaatcagctgttgcccgtctcactggtgaaaagaaaaaccaccctggcgcccaatacgcaaaccgcctctccccgcgcgttggccgattcattaatgcagctggcacgacaggtttcccgactggaaagcgggcagtgagcgcaacgcaattaatgtaagttagctcactcattaggcaccgggatctcgaccgatgcccttgagagccttcaacccagtcagctccttccggtgggcgcggggcatgactagcatgatcgtgctcctgtcgttgaggacccggctaggctggcggggttgccttactggttagcagaatgaatcaccgatacgcgataacttcgtataatgtatgctatacgaacggtagctcagctagcacccggaattgtgagcggataacaattccttggaattgtgagcggataacaattataattaagttgttaggaggttagaatgagcgatttcagcaccctcgaagtgatccgcgacccgcgcggcttcgccaccctgtggttaagccgtgaggacaagaacaacgccttcaatgcgcagatgatccgcgagctgatcgtggccatcgaccagttggccgaagacgccagcctgcgctttgtgctgctgcgcggccgtggccggcacttcagcgccggtgccgacctggcctggatgcagcagtcggcgcaactggacttcaacaccaacctggatgatgcccacgaactgggcgagctgatgtacgccctgcatcgcctcaaggccccgaccctggccgtggtgcaaggtgcagcctttggcggcgcgctgggcctgatcagctgctgcgacatggccatcggcgccgaagacgcccaactgtgcctgtcggaagtacgcatcggcctggccccggcggtcatcagcccgttcgtggtcaaggccattggcgaacgcgccgcgcgccgctacgccctcaccgccgagcgtttcactggcgtgcgcgcacgcgagctgggcctgctggccgaggtgtacccggccagcgaactggacgaccacgtcgaagcctgggtaagcaacctgctgcagaacagcccgcaagcattgcgcgccaccaaggacttgctgcgcgaagtggacgacggcgaactcagcccggccctgcgccgttactgcgaaaacaccatcgcccgtatccgcgtcagcgccgaaggccaggagggcctgcgcgctttcctggaaaaacgccgccctgcctggcaaaccgttgacaagaaggagccgcgcccatgaacgatagggaggactgcaatgaacccggactaccgcagcatccagcgcctcctggtcgccaaccgcggcgagatcgcctgccgggtgatgcgcagcgcgcgcgccctcggcatcggcagcgtcgccgtgcacagcgacatcgaccgccacgcccgccacgtcgccgaagccgacatcgccgtcgacctgggcggcgccaagcccgccgacagctacctgcgcggcgacaggatcatcgcagctgccctcgccagcggcgcccaggcgatccaccccggctacggcttcctctcggagaacgccgacttcgcccgcgcctgcgaggaagccggcctgctcttcctcggaccgccggcggcggccatcgacgccatgggcagcaagtcggccgccaaggcgctgatggaagaagccggcgtgccgctggtgcccggctatcacggcgaagcccaggacctcgagactttccgccgggaagccgggcgcatcggctacccggtgctgctcaaggccgccgctggcggcggcggcaagggcatgaaggtggtggagcgcgaggccgagctggccgaggccctttcctccgcccagcgcgaggccaaggccgccttcggcgacgcgcgtatgctggtggagaaatacctgctgaagccgcgccacgtggagatccaggtattcgccgaccgccatggccactgcctgtacctcaacgaacgcgactgttcgatccagcgccgccaccagaaggtcgtcgaggaagcccccgcccccggtctcggcgcggaactgcgccgggccatgggcgaggccgcggtacgcgcggcgcaggcgatcggctacgtcggcgccggtaccgtcgaattcctcctcgacgaacgcggccagttcttcttcatggaaatgaacacccgcctgcaggtggaacacccggtcaccgaggccatcaccggcctcgacctggtcgcctggcagatccgcgtcgctcgcggcgaggcgctaccgctgacgcaggaacaggtaccgctgaacggccacgccatcgaagtacggctctatgcggaagaccccgagggcgacttcctccccgccagcggccgcctgatgctataccgcgaagcggccgccggccccggccggcgggtcgacagcggggtacgcgaaggcgacgaggtctcgccgttctacgacccgatgctggccaagctgatcgcctggggcgaaacccgcgaggaagcccgccagcgcctgctggcgatgctggcggaaacctcggtcggcggcctgcgcaccaacctggcgttcctccgccgcatcctcggccatccggcgttcgccgccgccgaactggacaccgggttcatcgcgcgccaccaagacgacctgctgccggcgccgcaagcgctgccggagcatttctggcaagccgccgccgaagcctggctgcagagcgaaccgggccaccgtcgcgacgacgacccgcattcgccgtggagccgcaacgacggctggcgcagcgccctggcgcgggagtccgacctgatgctgcgctgccgcgacgaacgccgctgcgtccgcctgcgccacgccagccccagccagtatcgcctcgacggcgacgacctggtcagccgggtggacggtgtcacccgtcgctcggcggcgttgcgccgcggacgccaattgttcctcgaatgggagggcgaactgctggccatcgaagccgtcgacccgatcgccgaggccgaggccgcccatgcccaccagggcggtttgagcgcgccgatgaacggcagtatcgtgcgggtcctggtcgagcccggccagacggtcgaagccggcgccaccctggtggtgctggaggcgatgaagatggaacacagcatccgcgcgccccacgccggggtagtgaaggcgctgtattgcagcgagggcgaactggtcgaggaaggcacgccgctggtggagctggacgagaaccaggcctgagttgaggaggtagataatgtctgccaattttactgataaaaatggtcgccaatcaaaaggagttcttttactacgaactttggcgatgccttctgacaccaatgctaacggagatatttttggtggctggattatgtctcaaatggatatgggcggcgcgattttagcgaaagaaatcgcacacggacgcgtggttactgttgccgttgaaagtatgaattttatcaaaccaatctctgtgggcgatgttgtttgttgctacggtgaatgtctcaaagttgggcgttcttccattaaaattaaagtagaagtatgggtaaaaaaagtggcgagtgagccaattggcgaacgttattgtgtcaccgatgcggtatttacttttgttgcagttgataataatggtcgctctcgcacgattccccgtgaaaataaccaagagttagaaaaagcattagccttaatttcagaacaacccttgtaaaaaggagtgtatataaatggaaaactttatcggaagccacatgatttatacgtatgaaaacggatgggaatacgagatttatattaaaaacgaccatacaattgattatagaattcatagcggaatggttgccggacgctgggttcgagatcaggaagtgaatattgtcaaactgacagaaggcgtatataaagtgtcttggacagagccgactggcacggatgtttcattaaactttatgccaaatgaaaaacgcatgcatggcattattttcttcccgaaatgggtgcatgaacatcctgaaattacggtttgctaccaaaatgaccacattgatttgatgaaagaatcccgcgaaaaatatgaaacgtatccaaaatacgttgtacctgaatttgcggaaattacatttctgaaaaatgaaggagtcgacaacgaagaagtgatttcgaaggctccttatgagggaatgacagacgatattcgcgcgggaagattataaacagacaggaggacatacatgacgttaggaattgataaaatcaacttctatgtccccaaatattacgtggatatggcgaaattagcagaggcaagacaagttgatcccaacaagttcctcatcggtattggacagactgaaatggctgtttctcctgtcaatcaggacattgtaagtatgggtgcaaatgcagctaaggacataatcacagatgaggacaaaaagaaaatcggaatggtaatagtcgcaacagaatctgcagtagatgcagctaaagcagcagcagttcaaattcacaatttattagggattcaaccttttgcgagatgtttcgaaatgaaggaagcatgttatgctgcaactccagctatccaattggcaaaggactatctagctacaagacctaacgagaaagttttggtcatagctactgatactgctagatacggacttaactcaggaggtgaacctacacaaggtgcaggtgcagtagcaatggtcatatcccacaatcctagtatactcgcattaaacgaggatgcagttgcatatacggaagatgtgtacgacttttggagacctactggtcataagtaccctctagttgatggagctctttctaaggacgcttatatccgaagttttcaacagtcttggaatgagtatgcgaaaagacaaggcaaatccttagcagatttcgcaagtttatgcttccatgttcccttcactaaaatggggaaaaaagcgttagagtccatcatagataacgctgatgaaaccactcaagagagacttagatccggttatgaagatgctgtggactataaccgctatgttgggaacatttacacgggaagtttgtacctgtcactcatatccttgcttgagaatcgtgacttacaagcaggtgaaacgattggattgttctcgtatggaagtggtagtgtaggggagttttacagtgcgacgttagtagaaggctataaggaccatcttgatcaagctgcacataaagctctccttaataaccgtaccgaagttagtgtagatgcttacgagaccttctttaagaggtttgatgacgttgatttcgacgaacaacaagatgctgtacatgaagatcgtcatatcttctacctgagtaacatcgagaataacgtcagagagtaccatagaccagaatagacagtaggaggactagcatgacgcgtgaagtggtagtggtaagcggtgtccgtaccgcgatcgggacctttggcggcagcctgaaggatgtggcaccggcggagctgggcgcactggtggtgcgcgaggcgctggcgcgcgcgcaggtgtcgggcgacgatgtcggccacgtggtattcggcaacgtgatccagaccgagccgcgcgacatgtatctgggccgcgtcgcggccgtcaacggcggggtgacgatcaacgcccccgcgctgaccgtgaaccgcctgtgcggctcgggcctgcaggccattgtcagcgccgcgcagaccatcctgctgggcgataccgacgtcgccatcggcggcggcgcggaaagcatgagccgcgcaccgtacctggcgccggcagcgcgctggggcgcacgcatgggcgacgccggcctggtcgacatgatgctgggtgcgctgcacgatcccttccatcgcatccacatgggcgtgaccgccgagaatgtcgccaaggaatacgacatctcgcgcgcgcagcaggacgaggccgcgctggaatcgcaccgccgcgcttcggcagcgatcaaggccggctacttcaaggaccagatcgtcccggtggtgagcaagggccgcaagggcgacgtgaccttcgacaccgacgagcacgtgcgccatgacgccaccatcgacgacatgaccaagctcaggccggtcttcgtcaaggaaaacggcacggtcacggccggcaatgcctcgggcctgaacgacgccgccgccgcggtggtgatgatggagcgcgccgaagccgagcgccgcggcctgaagccgctggcccgcctggtgtcgtacggccatgccggcgtggacccgaaggccatgggcatcggcccggtgccggcgacgaagatcgcgctggagcgcgccggcctgcaggtgtcggacctggacgtgatcgaagccaacgaagcctttgccgcacaggcgtgcgccgtgaccaaggcgctcggtctggacccggccaaggttaacccgaacggctcgggcatctcgctgggccacccgatcggcgccaccggtgccctgatcacggtgaaggcgctgcatgagctgaaccgcgtgcagggccgctacgcgctggtgacgatgtgcatcggcggcgggcagggcattgccgccatcttcgagcgtatctgagctatcataaaaataagaagcctgcatttgcaggcttcttatttttat

SEQ ID NO: 54 - DNA, 23790 bp, artificial sequence
  plasmid SG798
agtgagcaataaaaataagaagcctgcatttgcaggcttcttatttttatagaccggggacttatcagccaacctgtaggccagcaaaaggccaggaaccgtaaaaaggccgcgttgctggcgtttttccataggctccgcccccctgacgagcatcacaaaaatcgacgctcaagtcagaggtggcgaaacccgacaggactataaagataccaggcgtttccccctggaagctccctcgtgcgctctcctgttccgaccctgccgcttaccggatacctgtccgcctttctcccttcgggaagcgtggcgctttctcatagctcacgctgtaggtatctcagttcggtgtaggtcgttcgctccaagctgggctgtgtgcacgaaccccccgttcagcccgaccgctgcgccttatccggtaactatcgtcttgagtccaacccggtaagacacgacttatcgccactggcagcagccactggtaacaggattagcagagcgaggtatgtaggcggtgctacagagttcttgaagtggtggcctaactacggctacactagaagaacagtatttggtatctgcgctctgctgaagccagttaccttcggaaaaagagttggtagctcttgatccggcaaacaaaccaccgctggtagcggtggtttttttgtttgcaagcagcagattacgcgcagaaaaaaaggatctcaagaagatcctttgatcttttctacggggtctgacgctcagtggaacgaaaactcacgttaagggattttggtcatgagattatcaaaaaggatcttcacctagatccttttaaattaaaaatgaagttttaaatcaatctaaagtatatatgagtaaacttggtctgacagactcttcctttttcaatattattgaagcatttatcagggttattgtctcatgagcggatacatatttgaatgtatttagaaaaataaacaaataggggttccgcgcacatttccccgaaaagtgccacctgacggtcctgcaggtaatacgactcactatagggataacttaaatttatattttttactttataatatataattgattatagaatccaaattagataggaggaccaggtaaatggagaataattttattgtcaacgaaaacgagaaaagggttttaaagcagatatttaacaactccaatatcagtagaactcaaatttccaagaatttagaactgaataaagcaacaatttcgaacattcttaacaatctaaagcataaaagtttggtaaatgaagttggtgaaggaaattctactaaaagtggtggaagaaaacctatacttctcgaaattaatcaaaagtatgggtattatataagcatggatttgacatatgattctgttgagttaatgtataactattttgatgctacaattctcaaacaagatagttatgaactgaatgataagaatgtaagtagcatattacagatactcaaatctaacataaatgttagcgaaaaatacgacacattatacggtttattagggataagtatatccatacatgggattgtagatgatgaacaaaacatcattaatctaccatttcacaagaatgaaaaaagaacgtttactgatgaacttaagtctttcactaatgtaccagtggttattgaaaatgaggcaaatttaagtgcattatacgagaaaagtttatacatcaattcgaatattaacaacttgatcacattgtctatacataaaggtataggagctggcatcataatcaataagaaactctatagaggtagtaatggagaagctggagaaataggaaagactcttgttttagagtctatcaataacaatgataacaagtactataaaatagaggatatttgtagtcaagacgctttgatacaaaagattaataacagattaggagttacacttacatttaccgaactaatacagtattataacgaaggaaatagtattgtagctcatgaaatcaaacagtttatcaacaaaatgactgtcttaatacacaatcttaatactcagtttaatccagatgcaatatacatcaattgtcccttgattaatgaacttcctaatattctaaacgaaatcaaagaacaattctcttgtttttcacaaggaagtcctatacaattgcatttaaccactaatgttaaacaagctacattattaggtggaacattagcaattatgcagaaaacccttaacataaacaatatccaaatgaatattaaatagttacagcagtctgagttataaaatagatatctcggaccgtctattcttccttatttgagtgggtaccaatgaaatctttcgagctaaatcgatttctggcccactcttttttattttttagtaagcgtttacaaaaaatgaacaatgtgctatattacctctaaagttagtttgtttattaaattaaccaactaaaatgtcgggatccttactgcaataggttgctactgttttatcatgaatcatcaacgaatgtattttgcatatttcagtatctttaataaactctttgcaatttttacaagttttcatatacgcccttcttttcataaattaatttatgaattctatgtattccaaggagcttttggatccaattaggaggaatctgcgatggaaaaaaaggaatttcgtgttttgataaaatactgttttctgaagggaaaaaatacggtggaagcaaaaacttggcttgataatgagtttccggactctgccccagggaaatcaacaataattgattggtatgcaaaattcaagcgtggtgaaatgagcacggaggacggtgaacgcagtggacgcccgaaagaggtggttaccgacgaaaacatcaaaaaaatccacaaaatgattttgaatgaccgtaaaatgaagttgatcgagatagcagaggccttaaagatatcaaaggaacgtgttggtcatatcattcatcaatatttggatatgcggaagctctgtgcaaaatgggtgccgcgcgagctcacatttgaccaaaaacaacaacgtgttgatgattctgagcggtgtttgcagctgttaactcgtaatacacccgagtttttccgtcgatatgtgacaatggatgaaacatggctccatcactacactcctgagtccaatcgacagtcggctgagtggacagcgaccggtgaaccgtctccgaagcgtggaaagactcaaaagtccgctggcaaagtaatggcctctgttttttgggatgcgcatggaataatttttatcgattatcttgagaagggaaaaaccatcaacagtgactattatatggcgttattggagcgtttgaaggtcgaaatcgcggcaaaacggccccacatgaagaagaaaaaagtgttgttccaccaagacaacgcaccgtgccacaagtcattgagaacgatggcaaaaattcatgaattgggcttcgaattgcttccccacccaccgtattctccagatctggcccccagcgactttttcttgttctcagacctcaaaaggatgctcgcagggaaaaaatttggctgcaatgaagaggtgatcgccgaaactgaggcctattttgaggcaaaaccgaaggagtactaccaaaatggtatcaaaaaattggaaggtcgttataatcgttgtatcgctcttgaagggaactatgttgaataagaattccttaattaaggagctcgataaaaataagaagcctgcatttgcaggcttcttatttttatggtcatagctgtttcctggcgcgccgccattatttttttgaacaattgacaattcatttcttattttttattaagtgatagtcaaaaggcataacagtgctgaatagaaagaaatttacagaaaagaaaattatagaatttagtatgattaattatactcatttatgaatgtttaattgaatacaaaaaaaaatacttgttatgtattcaattacgggttaaaatatagacaagttgaaaaatttaataaaaaaataagtcctcagctcttatatattaagctaccaacttagtatataagccaaaacttaaatgtgctaccaacacatcaagccgttagagaactctatctatagcaatatttcaaatgtaccgacatacaagagaaacattaactatatatattcaatttatgagattatcttaacagatataaatgtaaattgcaataagtaagatttagaagtttatagcctttgtgtattggaagcagtacgcaaaggcttttttatttgataaaaattagaagtatatttattttttcataattaatttatgaaaatgaaagggggtgagcaaagtgacagaggaaagcagtatcttatcaaataacaaggtattagcaatatcattattgactttagcagtaaacattatgacttttatagtgcttgtagctaagtagtacgaaagggggagctttaaaaagctccttggaatacatagaattcataaattaatttatgaaaagaagggcgtatatgaaaacttgtaaaaattgcaaagagtttattaaagatactgaaatatgcaaaatacattcgttgatgattcatgataaaacagtagcaacctattgcagtaaatacaatgagtcaagatgtttacataaagggaaagtccaatgtattaattgttcaaagatgaaccgatatggatggtgtgccataaaaatgagatgttttacagaggaagaacagaaaaaagaacgtacatgcattaaatattatgcaaggagctttaaaaaagctcatgtaaagaagagtaaaaagaaaaaataatttatttattaatttaatattgagagtgccgacacagtatgcactaaaaaatatatctgtggtgtagtgagccgatacaaaaggatagtcactcgcattttcataatacatcttatgttatgattatgtgtcggtgggacttcacgacgaaaacccacaataaaaaaagagttcggggtagggttaagcatagttgaggcaactaaacaatcaagctaggatatgcagtagcagaccgtaaggtcgttgtttaggtgtgttgtaatacatacgctattaagatgtaaaaatacggataccaatgaagggaaaagtataatttttggatgtagtttgtttgttcatctatgggcaaactacgtccaaagccgtttccaaatctgctaaaaagtatatcctttctaaaatcaaagtcaagtatgaaatcataaataaagtttaattttgaagttattatgatattatgtttttctattaaaataaattaagtatatagaatagtttaataatagtatatacttaatgtgataagtgtctgacagtgtcacagaaaggatgattgttatggattataagcggccggccagtgggcaagttgaaaaattcacaaaaatgtggtataatatctttgttcattagagcgataaacttgaatttgagagggaacttagatggtatttgaaaaaattgataaaaatagttggaacagaaaagagtattttgaccactactttgcaagtgtaccttgtacctacagcatgaccgttaaagtggatatcacacaaataaaggaaaagggaatgaaactatatcctgcaatgctttattatattgcaatgattgtaaaccgccattcagagtttaggacggcaatcaatcaagatggtgaattggggatatatgatgagatgataccaagctatacaatatttcacaatgatactgaaacattttccagcctttggactgagtgtaagtctgactttaaatcatttttagcagattatgaaagtgatacgcaacggtatggaaacaatcatagaatggaaggaaagccaaatgctccggaaaacatttttaatgtatctatgataccgtggtcaaccttcgatggctttaatctgaatttgcagaaaggatatgattatttgattcctatttttactatggggaaatattataaagaagataacaaaattatacttcctttggcaattcaagttcatcacgcagtatgtgacggatttcacatttgccgttttgtaaacgaattgcaggaattgataaatagttaacttcaggtttgtctgtaactaaaaacaagtatttaagcaaaaacatcgtagaaatacggtgttttttgttaccctaagtttactctatcattgatagagtgcgactctatcattgatagagtccacaggttggctgataagtccccggtctgtaccgttcgtataatgtatgctatacgaagttataggaggttataatgaacgagaaaaatataaaacacagtcaaaactttattacttcaaaacataatatagataaaataatgacaaatataagattaaatgaacatgataatatctttgaaatcggctcaggaaaagggcattttacccttgaattagtacagaggtgtaatttcgtaactgccattgaaatagaccataaattatgcaaaactacagaaaataaacttgttgatcacgataatttccaagttttaaacaaggatatattgcagtttaaatttcctaaaaaccaatcctataaaatatttggtaatataccttataacataagtacggatataatacgcaaaattgtttttgatagtatagctgatgagatttatttaatcgtggaatacgggtttgctaaaagattattaaatacaaaacgctcattggcattatttttaatggcagaagttgatatttctatattaagtatggttccaagagaatattttcatcctaaacctaaagtgaatagctcacttatcagattaaatagaaaaaaatcaagaatatcacacaaagataaacagaagtataattatttcgttatgaaatgggttaacaaagaatacaagaaaatatttacaaaaaatcaatttaacaattccttaaaacatgcaggaattgacgatttaaacaatattagctttgaacaattcttatctcttttcaatagctataaattatttaataagtaagttaagggatgcataaactgcatcccttaacttgtttttcgtgtacctattttttgtgaatcgattatgtcttttgcgcattcgtcgacaattgcatatattgataaaaataataatagtgggtataattaagttgttaggaggttagttagaatgagtagactcgataagtctaaagtgataaattccgcattagaactccttaatgaagttggaattgaaggtctaactaccaggaaattagctcagaaacttggagttgaacaaccaacattgtactggcatgtcaaaaacaaaagagcactcttagatgcattagcaatcgaaatgttagacagacatcatacacacttttgtccattagaaggtgaaagttggcaagactttttgaggaataacgcgaaaagtttcagatgtgctttactatcccatagagatggggctaaagttcacttaggaactagacctacagaaaagcagtatgagacacttgaaaatcagttggcatttctatgtcaacaaggattctcattagagaacgcattatatgctctttcagctgtaggtcatttcacgttaggttgtgttttggaagatcaagaacatcaagttgcaaaagaagagagagaaactcctactacagatagtatgccacctttattacgacaagctatagaactgtttgatcatcaaggagctgaacctgcgtttctctttggattggagttaataatttgcggactagagaaacagcttaagtgtgaaagtggatcttagttagcaccggtcagggtggtgaatgtgaaaccagtaacgttatacgatgtcgcagagtatgccggtgtctcttatcagaccgtttcccgcgtggtgaaccaggccagccacgtttctgcgaaaacgcgggaaaaagtggaagcggcgatggcggagctgaattacattcccaaccgcgtggcacaacaactggcgggcaaacagtcgttgctgattggcgttgccacctccagtctggccctgcacgcgccgtcgcaaattgtcgcggcgattaaatctcgcgccgatcaactgggtgccagcgtggtggtgtcgatggtagaacgaagcggcgtcgaagcctgtaaagcggcggtgcacaatcttctcgcgcaacgcgtcagtgggctgatcattaactatccgctggatgaccaggatgccattgctgtggaagctgcctgcactaatgttccggcgttatttcttgatgtctctgaccagacacccatcaacagtattattttctcccatgaagacggtacgcgactgggcgtggagcatctggtcgcattgggtcaccagcaaatcgcgctgttagcgggcccattaagttctgtctcggcgcgtctgcgtctggctggctggcataaatatctcactcgcaatcaaattcagccgatagcggaacgggaaggcgactggagtgccatgtccggttttcaacaaaccatgcaaatgctgaatgagggcatcgttcccactgcgatgctggttgccaacgatcagatggcgctgggcgcaatgcgcgccattaccgagtccgggctgcgcgttggtgcggacatctcggtagtgggatacgacgataccgaagacagctcatgttatatcccgccgttaaccaccatcaaacaggattttcgcctgctggggcaaaccagcgtggaccgcttgctgcaactctctcagggccaggcggtgaagggcaatcagctgttgcccgtctcactggtgaaaagaaaaaccaccctggcgcccaatacgcaaaccgcctctccccgcgcgttggccgattcattaatgcagctggcacgacaggtttcccgactggaaagcgggcagtgagcgcaacgcaattaatgtaagttagctcactcattaggcaccgggatctcgaccgatgcccttgagagccttcaacccagtcagctccttccggtgggcgcggggcatgactagcatgatcgtgctcctgtcgttgaggacccggctaggctggcggggttgccttactggttagcagaatgaatcaccgatacgcgataacttcgtataatgtatgctatacgaacggtagctcagctagcacccggaattgtgagcggataacaattccttggaattgtgagcggataacaattataattaagttgttaggaggttagaatgaaaaattgtgtcatcgtcagtgcggtacgtactgctatcggtagttttaacggttcactcgcttccaccagcgccatcgacctgggggcgacagtaattaaagccgccattgaacgtgcaaaaatcgattcacaacacgttgatgaagtgattatgggtaacgtgttacaagccgggctggggcaaaatccggcgcgtcaggcactgttaaaaagcgggctggcagaaacggtgtgcggattcacggtcaataaagtatgtggttcgggtcttaaaagtgtggcgcttgccgcccaggccattcaggcaggtcaggcgcagagcattgtggcggggggtatggaaaatatgagtttagccccctacttactcgatgcaaaagcacgctctggttatcgtcttggagacggacaggtttatgacgtaatcctgcgcgatggcctgatgtgcgccacccatggttatcatatggggattaccgccgaaaacgtggctaaagagtacggaattacccgtgaaatgcaggatgaactggcgctacattcacagcgtaaagcggcagccgcaattgagtccggtgcttttacagccgaaatcgtcccggtaaatgttgtcactcgaaagaaaaccttcgtcttcagtcaagacgaattcccgaaagcgaattcaacggctgaagcgttaggtgcattgcgcccggccttcgataaagcaggaacagtcaccgctgggaacgcgtctggtattaacgacggtgctgccgctctggtgattatggaagaatctgcggcgctggcagcaggccttacccccctggctcgcattaaaagttatgccagcggtggcgtgccccccgcattgatgggtatggggccagtacctgccacgcaaaaagcgttacaactggcggggctgcaactggcggatattgatctcattgaggctaatgaagcatttgctgcacagttccttgccgttgggaaaaacctgggctttgattctgagaaagtgaatgtcaacggcggggccatcgcgctcgggcatcctatcggtgccagtggtgctcgtattctggtcacactattacatgccatgcaggcacgcgataaaacgctggggctggcaacactgtgcattggcggcggtcagggaattgcgatggtgattgaacggttgaattaatagggaggtctgtttaatgaaaaaggtatgtgttataggtgcaggtactatgggttcaggaattgctcaggcatttgcagctaaaggatttgaagtagtattaagagatattaaagatgaatttgttgatagaggattagattttatcaataaaaatctttctaaattagttaaaaaaggaaagatagaagaagctactaaagttgaaatcttaactagaatttccggaacagttgaccttaatatggcagctgattgcgatttagttatagaagcagctgttgaaagaatggatattaaaaagcagatttttgctgacttagacaatatatgcaagccagaaacaattcttgcatcaaatacatcatcactttcaataacagaagtggcatcagcaactaaaagacctgataaggttataggtatgcatttctttaatccagctcctgttatgaagcttgtagaggtaataagaggaatagctacatcacaagaaacttttgatgcagttaaagagacatctatagcaataggaaaagatcctgtagaagtagcagaagcaccaggatttgttgtaaatagaatattaataccaatgattaatgaagcagttggtatattagcagaaggaatagcttcagtagaagacatagataaagctatgaaacttggagctaatcacccaatgggaccattagaattaggtgattttataggtcttgatatatgtcttgctataatggatgttttatactcagaaactggagattctaagtatagaccacatacattacttaagaagtatgtaagagcaggatggcttggaagaaaatcaggaaaaggtttctacgattattcaaaataagtttacaagaatccctttaggaggattagtcatggaactaaacaatgtcatccttgaaaaggaaggtaaagttgctgtagttaccattaacagacctaaagcattaaatgcgttaaatagtgatacactaaaagaaatggattatgttataggtgaaattgaaaatgatagcgaagtacttgcagtaattttaactggagcaggagaaaaatcatttgtagcaggagcagatatttctgagatgaaggaaatgaataccattgaaggtagaaaattcgggatacttggaaataaagtgtttagaagattagaacttcttgaaaagcctgtaatagcagctgttaatggttttgctttaggaggcggatgcgaaatagctatgtcttgtgatataagaatagcttcaagcaacgcaagatttggtcaaccagaagtaggtctcggaataacacctggttttggtggtacacaaagactttcaagattagttggaatgggcatggcaaagcagcttatatttactgcacaaaatataaaggcagatgaagcattaagaatcggacttgtaaataaggtagtagaacctagtgaattaatgaatacagcaaaagaaattgcaaacaaaattgtgagcaatgctccagtagctgttaagttaagcaaacaggctattaatagaggaatgcagtgtgatattgatactgctttagcatttgaatcagaagcatttggagaatgcttttcaacagaggatcaaaaggatgcaatgacagctttcatagagaaaagaaaaattgaaggcttcaaaaatagataggaggtaagtttataggaggaattccatatgagcggcccgaccaccgataccccggcggcgattcagatttgccgcattatgcgcccggatgatgcgaacgtggcgggcaacgtgcatggcggcaccattctgaaaatgattgaagaagcgggcgcgattattagcacccgccattgcaacagccagaacggcgaacgctgcgtggcggcgctggcgcgcgtggaacgcaccgattttctgagcccgatgtgcattggcgaagtggcgcatgtgagcgcggaaattacctataccagcaaacatagcgtggaagtgcaggtgcatgtgatgagcgaaaacattctgaccggcaccaaaaaactgaccaacaaagcgaccctgtggtatgtgccgctgagcctgaaaaacgtggataaagtgctggaagtgccgccgattgtgtatctgcgccaggaacaggaagaagaaggccgcaaacgctatgaagcgcagaaactggaacgcatggaaaccaaatggcgcaacggcgatattgtgcagccggtgctgaacccggaaccgaacaccgtgagctatagccagagcagcctgattcatctggtgggcccgagcgattgcaccctgcatggctttgtgcatggcggcgtgaccatgaaactgatggatgaagtggcgggcattgtggcggcgcgccattgcaaaaccaacattgtgaccgcgagcgtggatgcgattaactttcatgataaaattcgcaaaggctgcgtgattaccattagcggccgcatgacctttaccagcaacaaaagcatggaaattgaagtgctggtggatgcggatccggtggtggataacagccagaaacgctatcgcgcggcgagcgcgttttttacctatgtgagcctgaaccaggaaggcaaaccgatgccggtgccgcagctggtgccggaaaccgaagatgaaaaaaaacgctttgaagaaggcaaaggccgctatctgcagatgaaagcgaaacgccagggccataccgaaccgcagccgtagacgataggaggacgtacatgattgtaaaaccaatggttaggaacaatatttgtctaaacgctcatccgcaaggatgcaaaaaaggcgttgaggatcaaatagagtacacaaaaaagagaattaccgctgaggtaaaagccggagcaaaagcccctaaaaacgtgctggttctcggctgctcgaacggttacggacttgcaagccggataacggcagcattcggctatggggccgccactatcggcgtttcctttgaaaaagccggaagcgaaacaaagtacggcacacccggctggtacaacaacctggcctttgacgaggctgccaaaagggaaggcctttattccgtaactatagacggagacgccttttccgatgaaatcaaggcacaagtaatcgaagaagccaaaaagaaaggaattaaattcgatcttatagtttacagcttggcaagccctgtaagaaccgatcccgacacaggcataatgcacaagtccgtcttaaaacccttcggtaaaacatttacaggcaagacagtcgatccctttacgggagaactaaaagaaatctccgccgaacctgcaaacgatgaagaagccgctgcaaccgttaaggttatgggaggagaagactgggaacgctggataaagcagctttcaaaagaaggtcttttagaagaaggctgcattaccctagcctattcctatatcggccctgaggccactcaagccctctaccgaaagggcaccataggaaaggcaaaagaacaccttgaagcaactgcccaccgcctaaacaaagaaaacccgtcaatacgggccttcgtttcggtgaacaagggcttggtaacaagggcaagtgcggtaatccccgtaattcccctatacctcgcttccttgtttaaggttatgaaagaaaaaggaaaccacgagggctgtatcgagcagattacccgcctttatgccgaaagactctaccgtaaagacggcaccatccccgtcgatgaagaaaacagaatccgtatcgacgactgggagcttgaagaagacgttcaaaaggcggtttcggctttaatggaaaaagtaaccggcgaaaatgccgaaagcctaaccgaccttgcaggctaccgccacgactttttagcctcaaacggctttgatgtagaaggcatcaactacgaagccgaggtagaaaggttcgacaggatttaaaacacaggaggacgataatgacgcgtgaagtggtagtggtaagcggtgtccgtaccgcgatcgggacctttggcggcagcctgaaggatgtggcaccggcggagctgggcgcactggtggtgcgcgaggcgctggcgcgcgcgcaggtgtcgggcgacgatgtcggccacgtggtattcggcaacgtgatccagaccgagccgcgcgacatgtatctgggccgcgtcgcggccgtcaacggcggggtgacgatcaacgcccccgcgctgaccgtgaaccgcctgtgcggctcgggcctgcaggccattgtcagcgccgcgcagaccatcctgctgggcgataccgacgtcgccatcggcggcggcgcggaaagcatgagccgcgcaccgtacctggcgccggcagcgcgctggggcgcacgcatgggcgacgccggcctggtcgacatgatgctgggtgcgctgcacgatcccttccatcgcatccacatgggcgtgaccgccgagaatgtcgccaaggaatacgacatctcgcgcgcgcagcaggacgaggccgcgctggaatcgcaccgccgcgcttcggcagcgatcaaggccggctacttcaaggaccagatcgtcccggtggtgagcaagggccgcaagggcgacgtgaccttcgacaccgacgagcacgtgcgccatgacgccaccatcgacgacatgaccaagctcaggccggtcttcgtcaaggaaaacggcacggtcacggccggcaatgcctcgggcctgaacgacgccgccgccgcggtggtgatgatggagcgcgccgaagccgagcgccgcggcctgaagccgctggcccgcctggtgtcgtacggccatgccggcgtggacccgaaggccatgggcatcggcccggtgccggcgacgaagatcgcgctggagcgcgccggcctgcaggtgtcggacctggacgtgatcgaagccaacgaagcctttgccgcacaggcgtgcgccgtgaccaaggcgctcggtctggacccggccaaggttaacccgaacggctcgggcatctcgctgggccacccgatcggcgccaccggtgccctgatcacggtgaaggcgctgcatgagctgaaccgcgtgcagggccgctacgcgctggtgacgatgtgcatcggcggcgggcagggcattgccgccatcttcgagcgtatctgaacagaggaggacgatacatgagcatcaggacagtgggcatcgtcggtgccggcaccatgggcaatggcatcgcccaggcctgcgcagtggtaggtctcaacgtggtgatggtcgacatcagcgatgccgccgtgcagaagggtgtcgccaccgtggcaagcagcctggaccgtctgatcaagaaggaaaagctgaccgaggccgacaaggccagcgcgctggcgcgcatcaagggcagcacctcgtatgacgatctcaaggccaccgatatcgtgatcgaggccgccaccgagaactacgacctgaaggtcaagatcctcaagcagatcgacggcatcgtcggcgagaacgtgatcatcgcgtccaacacctcgtcgatctcgatcaccaagctggctgccgtgacctcgcgcgccgaccgctttatcggcatgcacttcttcaacccggtgccggtgatggcgctggtggaactgatccgcggcctgcagaccagcgacaccacccacgccgccgtcgaggccctgtcgaagcagctcggcaaatacccgatcacggtcaagaacagcccgggcttcgtcgtcaaccgcatcctgtgcccgatgatcaacgaggccttctgcgtgctgggcgaaggcctggcctcgccggaagagatcgacgaaggcatgaagctgggctgcaaccacccgatcgggccgctggcgctggctgacatgatcggcctggacaccatgctggccgtgatggaagtgctgtacacggagtttgccgatccgaagtaccgcccggcgatgctgatgcgcgagatggtcgctgccggctacctgggccgcaagactggccgcggcgtgtacgtctatagcaagtaatttacacgatcgacgtgctcagctagcacccggaattgtgagcggataacaattccttggaattgtgagcggataacaattataattaagttgttaggaggttagaatgagtctgaatttccttgattttgaacagccgattgcagagctggaagcgaaaatcgattctctgactgcggttagccgtcaggatgagaaactggatattaacatcgatgaagaagtgcatcgtctgcgtgaaaaaagcgtagaactgacacgtaaaatcttcgccgatctcggtgcatggcagattgcgcaactggcacgccatccacagcgtccttataccctggattacgttcgcctggcatttgatgaatttgacgaactggctggcgaccgcgcgtatgcagacgataaagctatcgtcggtggtatcgcccgtctcgatggtcgtccggtgatgatcattggtcatcaaaaaggtcgtgaaaccaaagaaaaaattcgccgtaactttggtatgccagcgccagaaggttaccgcaaagcactgcgtctgatgcaaatggctgaacgctttaagatgccaatcatcacctttatcgacaccccgggggcttatccgggcgtgggcgcagaagagcgcggtcagtctgaagccattgcacgcaacctgcgtgaaatgtctcgccttagcgtaccgactatttgtaccgttatcggtgaaggtggttctggcggcgcgctggcgattggcgtgggcgataaagtgaatatgctgcaatacagcacctattccgttatctcgccggaaggttgtgcgtccattctgtggaagagcgctgataaagcgccgctggcggctgaagcgatgggtatcatcgctccgcgtctgaaagaactaaaactgatcgactccatcatcccagaaccgctgggtggtgctcaccgtaacccggaagcgatggcggcatcgttgaaagcgcaactgttggcggatctggccgatctcgacgtgttaagcactgaagatttaaaaaatcgtcgttatcagcgcctgatgagctacggttacgcgtaataaggaggaacccactcatggatattcgtaagattaaaaaactgatcgagctggttgaagaatcaggcatctccgaactggaaatttctgaaggcgaagagtcagtacgcattagccgtgcagctcctgccgcaagtttccctgtgatgcaacaagcttacgctgcaccaatgatgcagcagccagctcaatctaacgcagccgctccggcgaccgttccttccatggaagcgccagcagcagcggaaatcagtggtcacatcgtacgttccccgatggttggtactttctaccgcaccccaagcccggacgcaaaagcgttcatcgaagtgggtcagaaagtcaacgtgggcgataccctgtgcatcgttgaagccatgaaaatgatgaaccagatcgaagcggacaaatccggtaccgtgaaagcaattctggtcgaaagtggacaaccggtagaatttgacgagccgctggtcgtcatcgagtaacgaggcgaacatgctggataaaattgttattgccaaccgcggcgagattgcattgcgtattcttcgtgcctgtaaagaactgggcatcaagactgtcgctgtgcactccagcgcggatcgcgatctaaaacacgtattactggcagatgaaacggtctgtattggccctgctccgtcagtaaaaagttatctgaacatcccggcaatcatcagcgccgctgaaatcaccggcgcagtagcaatccatccgggttacggcttcctctccgagaacgccaactttgccgagcaggttgaacgctccggctttatcttcattggcccgaaagcagaaaccattcgcctgatgggcgacaaagtatccgcaatcgcggcgatgaaaaaagcgggcgtcccttgcgtaccgggttctgacggcccgctgggcgacgatatggataaaaaccgtgccattgctaaacgcattggttatccggtgattatcaaagcctccggcggcggcggcggtcgcggtatgcgcgtagtgcgcggcgacgctgaactggcacaatccatctccatgacccgtgcggaagcgaaagctgctttcagcaacgatatggtttacatggagaaatacctggaaaatcctcgccacgtcgagattcaggtactggctgacggtcagggcaacgctatctatctggcggaacgtgactgctccatgcaacgccgccaccagaaagtggtcgaagaagcgccagcaccgggcattaccccggaactgcgtcgctacatcggcgaacgttgcgctaaagcgtgtgttgatatcggctatcgcggtgcaggtactttcgagttcctgttcgaaaacggcgagttctatttcatcgaaatgaacacccgtattcaggtagaacacccggttacagaaatgatcaccggcgttgacctgatcaaagaacagctgcgtatcgctgccggtcaaccgctgtcgatcaagcaagaagaagttcacgttcgcggccatgcggtggaatgtcgtatcaacgccgaagatccgaacaccttcctgccaagtccgggcaaaatcacccgtttccacgcacctggcggttttggcgtacgttgggagtctcatatctacgcgggctacaccgtaccgccgtactatgactcaatgatcggtaagctgatttgctacggtgaaaaccgtgacgtggcgattgcccgcatgaagaatgcgctgcaggagctgatcatcgacggtatcaaaaccaacgttgatctgcagatccgcatcatgaatgacgagaacttccagcatggtggcactaacatccactatctggagaaaaaactcggtcttcaggaaaaataatataggaggatataacatgagctggattgaacgaattaaaagcaacattactcccacccgcaaggcgagcattcctgaaggggtgtggactaagtgtgatagctgcggtcaggttttataccgcgctgagctggaacgtaatcttgaggtctgtccgaagtgtgaccatcacatgcgtatgacagcgcgtaatcgcctgcatagcctgttagatgaaggaagccttgtggagctgggtagcgagcttgagccgaaagatgtgctgaagtttcgtgactccaagaagtataaagaccgtctggcatctgcgcagaaagaaaccggcgaaaaagatgcgctggtggtgatgaaaggcactctgtatggaatgccggttgtcgctgcggcattcgagttcgcctttatgggcggttcaatggggtctgttgtgggtgcacgtttcgtgcgtgccgttgagcaggcgctggaagataactgcccgctgatctgcttctccgcctctggtggcgcacgtatgcaggaagcactgatgtcgctgatgcagatggcgaaaacctctgcggcactggcaaaaatgcaggagcgcggcttgccgtacatctccgtgctgaccgacccgacgatgggcggtgtttctgcaagtttcgccatgctgggcgatctcaacatcgctgaaccgaaagcgttaatcggctttgccggtccgcgtgttatcgaacagaccgttcgcgaaaaactgccgcctggattccagcgcagtgaattcctgatcgagaaaggcgcgatcgacatgatcgtccgtcgtccggaaatgcgcctgaaactggcgagtattctggcgaagttgatgaatctgccagcgccgaatcctgaagcgccgcgtgaaggcgtagtggtacccccggtaccggatcaggaacctgaggcctgagactaggaggatcttaaatgaccgacgtccgattccgcattatcggtacgggtgcctacgtaccggaacggatcgtctccaacgatgaagtcggcgcgccggccggggtggacgacgactggatcacccgcaagaccggtatccggcagcgtcgctgggccgccgacgaccaggccacctcggacctggccacggccgcggggcgggcagcgctgaaagcggcgggcatcacgcccgagcagctgaccgtgatcgcggtcgccacctccacgccggaccggccgcagccgcccacggcggcctatgtccagcaccacctcggtgcgaccggcactgcggcgttcgacgtcaacgcggtctgctccggcaccgtgttcgcgctgtcctcggtggcgggcaccctcgtgtaccggggcggttacgcgctggtcatcggcgcggacctgtactcgcgcatcctcaacccggccgaccgcaagacggtcgtgctgttcggggacggcgccggcgcaatggtcctcgggccgacctcgaccggcacgggccccatcgtccggcgcgtcgccctgcacaccttcggcggcctcaccgacctgatccgtgtgcccgcgggcggcagccgccagccgctggacacggatggcctcgacgcgggactgcagtacttcgcgatggacgggcgtgaggtgcgccgcttcgtcacggagcacctgccgcagctgatcaagggcttcctgcacgaggccggggtcgacgccgccgacatcagccacttcgtgccgcatcaggccaacggtgtcatgctcgacgaggtcttcggcgagctgcatctgccgcgggcgaccatgcaccggacggtcgagacctacggcaacacgggagcggcctccatcccgatcaccatggacgcggccgtgcgcgccggttccttccggccgggcgagctggtcctgctggccgggttcggcggcggcatggccgcgagcttcgccctgatcgagtggtaggctcagctagcacccggaattgtgagcggataacaattccttggaattgtgagcggataacaattataattaagttgttaggaggttagaatgactcagcgcattgcgtatgtgaccggcggcatgggtggtatcggaaccgccatttgccagcggctggccaaggatggctttcgtgtggtggccggttgcggccccaactcgccgcgccgcgaaaagtggctggagcagcagaaggccctgggcttcgatttcattgcctcggaaggcaatgtggctgactgggactcgaccaagaccgcattcgacaaggtcaagtccgaggtcggcgaggttgatgtgctgatcaacaacgccggtatcacccgcgacgtggtgttccgcaagatgacccgcgccgactgggatgcggtgatcgacaccaacctgacctcgctgttcaacgtcaccaagcaggtgatcgacggcatggccgaccgtggctggggccgcatcgtcaacatctcgtcggtgaacgggcagaagggccagttcggccagaccaactactccaccgccaaggccggcctgcatggcttcaccatggcactggcgcaggaagtggcgaccaagggcgtgaccgtcaacacggtctctccgggctatatcgccaccgacatggtcaaggcgatccgccaggacgtgctcgacaagatcgtcgcgacgatcccggtcaagcgcctgggcctgccggaagagatcgcctcgatctgcgcctggttgtcgtcggaggagtccggtttctcgaccggcgccgacttctcgctcaacggcggcctgcatatgggctgaacaggaggcaataaatgagcgcacaatccctggaagtaggccagaaggcccgtctcagcaagcggttcggggcggcggaggtagccgccttcgccgcgctctcggaggacttcaaccccctgcacctggacccggccttcgccgccaccacggcgttcgagcggcccatagtccacggcatgctgctcgccagcctcttctccgggctgctgggccagcagttgccgggcaaggggagcatctatctgggtcaaagcctcagcttcaagctgccggtctttgtcggggacgaggtgacggccgaggtggaggtgaccgcccttcgcgaggacaagcccatcgccaccctgaccacccgcatcttcacccaaggcggcgccctcgccgtgacgggggaagccgtggtcaagctgccttaagttgaggaggtagataatgtctacaacacataacgtccctcagggcgatcttgttttacgtactttagccatgcccgccgataccaatgccaatggtgacatctttggtggttggttaatgtcacaaatggatattggcggcgctattctggcaaaagaaattgcccacggtcgcgtagtgactgtgcgggttgaaggaatgactttcttacggccggttgcggtcggcgatgtggtgtgctgctatgcacgctgtgtccagaaagggacgacatcggtcagcattaatattgaagtgtgggtgaaaaaagtagcgtctgaaccaatcgggcaacggtataaagcgacagaagcattatttaagtatgtcgcggttgatcctgaaggaaaacctcgcgccttacctgttgagtaaagcgactgacgtaggaggatatcaatgctcctatttccaagaagaactaatatagcctttttcaaaacaacaggcatttttgctaattttcctttgctaggtagaaccattacaacttcaccatctttccttacacataaactgtcaaaggaagtaaccagggcatcaacttcgcctccaagaccaaagagaattgttgtcgcaattactggtgcgactggtgttgcactgggaatcagacttctacaagtgctaaaagagttgagcgtagaaacccatttggtgatttcaaaatggggtgcagcaacaatgaaatatgaaacagattgggaaccgcatgacgtggcggccttggcaaccaagacatactctgttcgtgatgtttctgcatgcatttcgtccggatctttccagcatgatggtatgattgttgtgccctgttccatgaaatcactagctgctattagaatcggttttacagaggatttaattacaagagctgccgatgtttcgattaaagagaatcgtaagttactactggttactcgggaaacccctttatcttccatccatcttgaaaacatgttgtctttatgcagggcaggtgttataatttttcctccggtacctgcgttttatacaagacccaagagccttcatgacctattagaacaaagtgttggcaggatcctagactgctttggcatccacgctgacacttttcctcgttgggaaggaataaaaagcaagtaatactatcataaaaataagaagcctgcatttgcaggcttcttatttttat

SEQ ID NO: 55 - DNA, 29422 bp, artificial sequence
  plasmid SG813
agtgagcaataaaaataagaagcctgcatttgcaggcttcttatttttatagaccggggacttatcagccaacctgtaggccagcaaaaggccaggaaccgtaaaaaggccgcgttgctggcgtttttccataggctccgcccccctgacgagcatcacaaaaatcgacgctcaagtcagaggtggcgaaacccgacaggactataaagataccaggcgtttccccctggaagctccctcgtgcgctctcctgttccgaccctgccgcttaccggatacctgtccgcctttctcccttcgggaagcgtggcgctttctcatagctcacgctgtaggtatctcagttcggtgtaggtcgttcgctccaagctgggctgtgtgcacgaaccccccgttcagcccgaccgctgcgccttatccggtaactatcgtcttgagtccaacccggtaagacacgacttatcgccactggcagcagccactggtaacaggattagcagagcgaggtatgtaggcggtgctacagagttcttgaagtggtggcctaactacggctacactagaagaacagtatttggtatctgcgctctgctgaagccagttaccttcggaaaaagagttggtagctcttgatccggcaaacaaaccaccgctggtagcggtggtttttttgtttgcaagcagcagattacgcgcagaaaaaaaggatctcaagaagatcctttgatcttttctacggggtctgacgctcagtggaacgaaaactcacgttaagggattttggtcatgagattatcaaaaaggatcttcacctagatccttttaaattaaaaatgaagttttaaatcaatctaaagtatatatgagtaaacttggtctgacagactcttcctttttcaatattattgaagcatttatcagggttattgtctcatgagcggatacatatttgaatgtatttagaaaaataaacaaataggggttccgcgcacatttccccgaaaagtgccacctgacggtcctgcaggtaatacgactcactatagggataacttaaatttatattttttactttataatatataattgattatagaatccaaattagataggaggaccaggtaaatggagaataattttattgtcaacgaaaacgagaaaagggttttaaagcagatatttaacaactccaatatcagtagaactcaaatttccaagaatttagaactgaataaagcaacaatttcgaacattcttaacaatctaaagcataaaagtttggtaaatgaagttggtgaaggaaattctactaaaagtggtggaagaaaacctatacttctcgaaattaatcaaaagtatgggtattatataagcatggatttgacatatgattctgttgagttaatgtataactattttgatgctacaattctcaaacaagatagttatgaactgaatgataagaatgtaagtagcatattacagatactcaaatctaacataaatgttagcgaaaaatacgacacattatacggtttattagggataagtatatccatacatgggattgtagatgatgaacaaaacatcattaatctaccatttcacaagaatgaaaaaagaacgtttactgatgaacttaagtctttcactaatgtaccagtggttattgaaaatgaggcaaatttaagtgcattatacgagaaaagtttatacatcaattcgaatattaacaacttgatcacattgtctatacataaaggtataggagctggcatcataatcaataagaaactctatagaggtagtaatggagaagctggagaaataggaaagactcttgttttagagtctatcaataacaatgataacaagtactataaaatagaggatatttgtagtcaagacgctttgatacaaaagattaataacagattaggagttacacttacatttaccgaactaatacagtattataacgaaggaaatagtattgtagctcatgaaatcaaacagtttatcaacaaaatgactgtcttaatacacaatcttaatactcagtttaatccagatgcaatatacatcaattgtcccttgattaatgaacttcctaatattctaaacgaaatcaaagaacaattctcttgtttttcacaaggaagtcctatacaattgcatttaaccactaatgttaaacaagctacattattaggtggaacattagcaattatgcagaaaacccttaacataaacaatatccaaatgaatattaaatagttacagcagtctgagttataaaatagatatctcggaccgtctattcttccttatttgagtgggtaccaatgaaatctttcgagctaaatcgatttctggcccactcttttttattttttagtaagcgtttacaaaaaatgaacaatgtgctatattacctctaaagttagtttgtttattaaattaaccaactaaaatgtcgggatccttactgcaataggttgctactgttttatcatgaatcatcaacgaatgtattttgcatatttcagtatctttaataaactctttgcaatttttacaagttttcatatacgcccttcttttcataaattaatttatgaattctatgtattccaaggagcttttggatccaattaggaggaatctgcgatggaaaaaaaggaatttcgtgttttgataaaatactgttttctgaagggaaaaaatacggtggaagcaaaaacttggcttgataatgagtttccggactctgccccagggaaatcaacaataattgattggtatgcaaaattcaagcgtggtgaaatgagcacggaggacggtgaacgcagtggacgcccgaaagaggtggttaccgacgaaaacatcaaaaaaatccacaaaatgattttgaatgaccgtaaaatgaagttgatcgagatagcagaggccttaaagatatcaaaggaacgtgttggtcatatcattcatcaatatttggatatgcggaagctctgtgcaaaatgggtgccgcgcgagctcacatttgaccaaaaacaacaacgtgttgatgattctgagcggtgtttgcagctgttaactcgtaatacacccgagtttttccgtcgatatgtgacaatggatgaaacatggctccatcactacactcctgagtccaatcgacagtcggctgagtggacagcgaccggtgaaccgtctccgaagcgtggaaagactcaaaagtccgctggcaaagtaatggcctctgttttttgggatgcgcatggaataatttttatcgattatcttgagaagggaaaaaccatcaacagtgactattatatggcgttattggagcgtttgaaggtcgaaatcgcggcaaaacggccccacatgaagaagaaaaaagtgttgttccaccaagacaacgcaccgtgccacaagtcattgagaacgatggcaaaaattcatgaattgggcttcgaattgcttccccacccaccgtattctccagatctggcccccagcgactttttcttgttctcagacctcaaaaggatgctcgcagggaaaaaatttggctgcaatgaagaggtgatcgccgaaactgaggcctattttgaggcaaaaccgaaggagtactaccaaaatggtatcaaaaaattggaaggtcgttataatcgttgtatcgctcttgaagggaactatgttgaataagaattccttaattaaggagctcgataaaaataagaagcctgcatttgcaggcttcttatttttatggtcatagctgtttcctggcgcgccgccattatttttttgaacaattgacaattcatttcttattttttattaagtgatagtcaaaaggcataacagtgctgaatagaaagaaatttacagaaaagaaaattatagaatttagtatgattaattatactcatttatgaatgtttaattgaatacaaaaaaaaatacttgttatgtattcaattacgggttaaaatatagacaagttgaaaaatttaataaaaaaataagtcctcagctcttatatattaagctaccaacttagtatataagccaaaacttaaatgtgctaccaacacatcaagccgttagagaactctatctatagcaatatttcaaatgtaccgacatacaagagaaacattaactatatatattcaatttatgagattatcttaacagatataaatgtaaattgcaataagtaagatttagaagtttatagcctttgtgtattggaagcagtacgcaaaggcttttttatttgataaaaattagaagtatatttattttttcataattaatttatgaaaatgaaagggggtgagcaaagtgacagaggaaagcagtatcttatcaaataacaaggtattagcaatatcattattgactttagcagtaaacattatgacttttatagtgcttgtagctaagtagtacgaaagggggagctttaaaaagctccttggaatacatagaattcataaattaatttatgaaaagaagggcgtatatgaaaacttgtaaaaattgcaaagagtttattaaagatactgaaatatgcaaaatacattcgttgatgattcatgataaaacagtagcaacctattgcagtaaatacaatgagtcaagatgtttacataaagggaaagtccaatgtattaattgttcaaagatgaaccgatatggatggtgtgccataaaaatgagatgttttacagaggaagaacagaaaaaagaacgtacatgcattaaatattatgcaaggagctttaaaaaagctcatgtaaagaagagtaaaaagaaaaaataatttatttattaatttaatattgagagtgccgacacagtatgcactaaaaaatatatctgtggtgtagtgagccgatacaaaaggatagtcactcgcattttcataatacatcttatgttatgattatgtgtcggtgggacttcacgacgaaaacccacaataaaaaaagagttcggggtagggttaagcatagttgaggcaactaaacaatcaagctaggatatgcagtagcagaccgtaaggtcgttgtttaggtgtgttgtaatacatacgctattaagatgtaaaaatacggataccaatgaagggaaaagtataatttttggatgtagtttgtttgttcatctatgggcaaactacgtccaaagccgtttccaaatctgctaaaaagtatatcctttctaaaatcaaagtcaagtatgaaatcataaataaagtttaattttgaagttattatgatattatgtttttctattaaaataaattaagtatatagaatagtttaataatagtatatacttaatgtgataagtgtctgacagtgtcacagaaaggatgattgttatggattataagcggccggccagtgggcaagttgaaaaattcacaaaaatgtggtataatatctttgttcattagagcgataaacttgaatttgagagggaacttagatggtatttgaaaaaattgataaaaatagttggaacagaaaagagtattttgaccactactttgcaagtgtaccttgtacctacagcatgaccgttaaagtggatatcacacaaataaaggaaaagggaatgaaactatatcctgcaatgctttattatattgcaatgattgtaaaccgccattcagagtttaggacggcaatcaatcaagatggtgaattggggatatatgatgagatgataccaagctatacaatatttcacaatgatactgaaacattttccagcctttggactgagtgtaagtctgactttaaatcatttttagcagattatgaaagtgatacgcaacggtatggaaacaatcatagaatggaaggaaagccaaatgctccggaaaacatttttaatgtatctatgataccgtggtcaaccttcgatggctttaatctgaatttgcagaaaggatatgattatttgattcctatttttactatggggaaatattataaagaagataacaaaattatacttcctttggcaattcaagttcatcacgcagtatgtgacggatttcacatttgccgttttgtaaacgaattgcaggaattgataaatagttaacttcaggtttgtctgtaactaaaaacaagtatttaagcaaaaacatcgtagaaatacggtgttttttgttaccctaagtttactctatcattgatagagtgcgactctatcattgatagagtccacaggttggctgataagtccccggtctgtaccgttcgtataatgtatgctatacgaagttataggaggttataatgaacgagaaaaatataaaacacagtcaaaactttattacttcaaaacataatatagataaaataatgacaaatataagattaaatgaacatgataatatctttgaaatcggctcaggaaaagggcattttacccttgaattagtacagaggtgtaatttcgtaactgccattgaaatagaccataaattatgcaaaactacagaaaataaacttgttgatcacgataatttccaagttttaaacaaggatatattgcagtttaaatttcctaaaaaccaatcctataaaatatttggtaatataccttataacataagtacggatataatacgcaaaattgtttttgatagtatagctgatgagatttatttaatcgtggaatacgggtttgctaaaagattattaaatacaaaacgctcattggcattatttttaatggcagaagttgatatttctatattaagtatggttccaagagaatattttcatcctaaacctaaagtgaatagctcacttatcagattaaatagaaaaaaatcaagaatatcacacaaagataaacagaagtataattatttcgttatgaaatgggttaacaaagaatacaagaaaatatttacaaaaaatcaatttaacaattccttaaaacatgcaggaattgacgatttaaacaatattagctttgaacaattcttatctcttttcaatagctataaattatttaataagtaagttaagggatgcataaactgcatcccttaacttgtttttcgtgtacctattttttgtgaatcgattatgtcttttgcgcattcgtcgacaattgcatatattgataaaaataataatagtgggtataattaagttgttaggaggttagttagaatgagtagactcgataagtctaaagtgataaattccgcattagaactccttaatgaagttggaattgaaggtctaactaccaggaaattagctcagaaacttggagttgaacaaccaacattgtactggcatgtcaaaaacaaaagagcactcttagatgcattagcaatcgaaatgttagacagacatcatacacacttttgtccattagaaggtgaaagttggcaagactttttgaggaataacgcgaaaagtttcagatgtgctttactatcccatagagatggggctaaagttcacttaggaactagacctacagaaaagcagtatgagacacttgaaaatcagttggcatttctatgtcaacaaggattctcattagagaacgcattatatgctctttcagctgtaggtcatttcacgttaggttgtgttttggaagatcaagaacatcaagttgcaaaagaagagagagaaactcctactacagatagtatgccacctttattacgacaagctatagaactgtttgatcatcaaggagctgaacctgcgtttctctttggattggagttaataatttgcggactagagaaacagcttaagtgtgaaagtggatcttagttagcaccggtcagggtggtgaatgtgaaaccagtaacgttatacgatgtcgcagagtatgccggtgtctcttatcagaccgtttcccgcgtggtgaaccaggccagccacgtttctgcgaaaacgcgggaaaaagtggaagcggcgatggcggagctgaattacattcccaaccgcgtggcacaacaactggcgggcaaacagtcgttgctgattggcgttgccacctccagtctggccctgcacgcgccgtcgcaaattgtcgcggcgattaaatctcgcgccgatcaactgggtgccagcgtggtggtgtcgatggtagaacgaagcggcgtcgaagcctgtaaagcggcggtgcacaatcttctcgcgcaacgcgtcagtgggctgatcattaactatccgctggatgaccaggatgccattgctgtggaagctgcctgcactaatgttccggcgttatttcttgatgtctctgaccagacacccatcaacagtattattttctcccatgaagacggtacgcgactgggcgtggagcatctggtcgcattgggtcaccagcaaatcgcgctgttagcgggcccattaagttctgtctcggcgcgtctgcgtctggctggctggcataaatatctcactcgcaatcaaattcagccgatagcggaacgggaaggcgactggagtgccatgtccggttttcaacaaaccatgcaaatgctgaatgagggcatcgttcccactgcgatgctggttgccaacgatcagatggcgctgggcgcaatgcgcgccattaccgagtccgggctgcgcgttggtgcggacatctcggtagtgggatacgacgataccgaagacagctcatgttatatcccgccgttaaccaccatcaaacaggattttcgcctgctggggcaaaccagcgtggaccgcttgctgcaactctctcagggccaggcggtgaagggcaatcagctgttgcccgtctcactggtgaaaagaaaaaccaccctggcgcccaatacgcaaaccgcctctccccgcgcgttggccgattcattaatgcagctggcacgacaggtttcccgactggaaagcgggcagtgagcgcaacgcaattaatgtaagttagctcactcattaggcaccgggatctcgaccgatgcccttgagagccttcaacccagtcagctccttccggtgggcgcggggcatgactagcatgatcgtgctcctgtcgttgaggacccggctaggctggcggggttgccttactggttagcagaatgaatcaccgatacgcgataacttcgtataatgtatgctatacgaacggtagctcagctagcacccggaattgtgagcggataacaattccttggaattgtgagcggataacaattataattaagttgttaggaggttagaatggaaaactttatcggaagccacatgatttatacgtatgaaaacggatgggaatacgagatttatattaaaaacgaccatacaattgattatagaattcatagcggaatggttgccggacgctgggttcgagatcaggaagtgaatattgtcaaactgacagaaggcgtatataaagtgtcttggacagagccgactggcacggatgtttcattaaactttatgccaaatgaaaaacgcatgcatggcattattttcttcccgaaatgggtgcatgaacatcctgaaattacggtttgctaccaaaatgaccacattgatttgatgaaagaatcccgcgaaaaatatgaaacgtatccaaaatacgttgtacctgaatttgcggaaattacatttctgaaaaatgaaggagtcgacaacgaagaagtgatttcgaaggctccttatgagggaatgacagacgatattcgcgcgggaagattataaagtacgataggaggatcactatgtatgattttgtgattattggcggtggcatcatcggcatgtcgaccgccatgcaactgattgatgtctacccggacgcccgcattgcgttgctggaaaaagagtccggcccggcctgtcaccagacgggccacaacagcggcgtgatccatgccggggtttattacacgcccggtagcctgaaggcacagttttgcctggcgggaaaccgcgccactaaagccttttgcgatcaaaacggcattcgctatgacaactgcggcaagatgctggtcgccacctctgaactcgaaatggaacggatgcgcgcgttgtgggaacgcacggcggcaaacggtatcgagcgcgagtggttaaacgccgatgaactgcgcgagcgcgaaccgaatatcaccgggcttggcggtatttttgtgccgtccagcggcattgtcagctaccgcgaagtaacggcggcgatggcaaaaattttccaggccagaggcggcgagattatctataacgccgaagtcagcggcctcagtgagcataaaaacggcgtggtgatacgtacccgccagggcggcgaatatgaagcatcgacgctgattagctgttccgggctgatggctgaccggctggtgaaaatgctcggactcgaaccgggctttatcatctgcccgttccgtggtgagtatttccgccttgcgccggagcataaccagattgttaaccacctgatttaccccattcccgaccccgcgatgccatttttgggcgtgcatctcacccgaatgatcgatggcagcgtgaccgtcgggccaaacgcggtgctggcttttaaacgcgaaggctaccacaagcgcgacttctcgtttagcgacacgctggaaattttgggctcgtcggggattcgccgggtgctgcaaaaccatctacgctcaggactgggcgagatgaaaaactcgctgtgcaaaagcggctatctgcggctggtgcaaaagtattgtccccggctttcgttaagcgatctccagccctggcccgccggtgtgcgggcgcaggcggtatcgccggacggcaagctgattgacgattttctgtttgtcaccaccccgcgcacgatccacacctgcaatgcgccctccccggcagcgacatcagcaattcctattggtgcgtatattgtcagcaaggtacaaacgctgttggcaagccagagtaaccccggacgcacgctgcgagcggcacgtagtgtggatgccttacacgccgcatttaatcaataaaagtcgactgaggaggatcatcatgacattacaagaggcagttgcaaagtttgttgaagatggcgacgctatctccttcggcggctttacaacaaacaagaaacctatggctgctgttcgcgagattctgcgccagggcaagaaagacttcatcgcatatgcaggtcctgccggatctgactgggatatgctgattggagaggatcgcgtaaaagcgtacatcaactgctatacagctgactccggtgttaccaacgtttcccgtcgtttccgcaaaaaaatcgaggccggcgagctgatctatgaggactactcccaggatgccatcatgtacatgcttcacgctgcttccttaggtcttccattcttaccggtacgttttatgatcggttccggactggttgatgagtggggaatcacaaaggaagtgcgccagactatcgacaagctgccgaacgacaaatttgtgtacatggacaacccatttaacccaggtgagaagaccgtatgccttccagttccgcagctggatacagcaatcatccacgtacagaaggcttcacctgacggaacctgcattctgctcggcgacgagttccacgatgtagatattgctgttgcagctaagaaggttatcgttacatgtgaggagctggtaagcaacgaagtgatccgcagagatccaacccttacaaagattccgtgcttcgcagttgacgctgtctgcgttgctccttacggcgcatacccgacacagtgctacggctactatgattatgacaacagcttcctgaaggcttatggcgcagccagcaagacagaggaggatttcaaggcattcttaaaagagtacgtttacgacgtgaaagacaatgaagagttccttgagaagatcggtgtaaatcgtctccttaagttaaaagtatctgatggctttggatatgcaacagatgtaagcaaggaggattaagtagctgaggaggatctagaatgggtcaaaaatcaaaggcaatgacacttgtaaagaatttattagataatcattataaagaagtaaatatggcaaaagaaagaggggaactagttggttggtcaacatcaatatttcctcaagagattgcagaaacatttggattacatgtattatatcctgaaaatcatgcggcagcagtagcagccaagcacgaatctttgaaagtatgcgaagttgctgaaagtaaaggatattcaatagatatatgttcttatgctagagtaaatttaggatatgtagacttaaagaaaatagaaagtataaacatgcctcaaccagacttcatactttgctgtaataacatatgtaataccgttataaaatggtatgaaaacatagcaaaggaattaaatattcctatgattttaatggataccccttttaacagtgaatacgaaattactcaagaaagaattgattatttcaaaggacagcttcaagaggctataagaaaattagaagaaattacaggtaaaaaatttgaccaaaagcgttttgaagaagttatgaaaatatccacagaagcgggaaatttgtggaaagaatctatgagtctaacaaaggctattccagcaccaatgaatggatttgaaatgtttaattatatggctgttatagtttgtgctcgtgggaaaaaggaaactgtagaaatttttaagactcttatagatgaattgcaagaaagaatagataagggagaaacaagttatagaggagaacaaaaacacagaatcatgtttgaaggtataccatgttggccatatctaagttataaattaagatcattaaatgataaaggaattaatatggtaggtagtgtttatacggatgcgtgggcacttcaatatgaatcaaatgatcttgatggaatggcaaaagcatattgtagcataatgaataatgttaatttagatagacaagtagacatgagagctaaagttattagagattttaagtgtgatggagcaatatatcatatgaatcgaagctgtaagctaatggattttatgcaatatgagttagaaagaagagtagaagcaaaaactaatgtgccatatattggatttgatggggaccaagcagatccaaggaacttcacaaaagctcagtttgaaacaagagtacaaggacttgcagaagttatggaagaaagaaaaaatgtaggaggtgtaaagcatgaatagagatgactgcaggaggatctacaatggctgataagaaagaggtcaaaaagaatgcagcaaaagtgattaatggtatattagctaaatcttatgcagatgcttggaaggcaaaagaagaaggaagaccggttggttggtcaacttccgtatttccacaggaattagtagaagtttttggtttagacgtattatatccagaaaaccaagctgcaggggttgcagctaagaaagaatctttatctctttgtgaagctgcagaaagtgctggatattcaattgatttatgtgcatatgcaagaacaaattttggacttttagaaaagggtggttcagaaaacttaaatatgccaaagcctgactttatatgctgctgtaataatatttgtaatcaagttattaaatggtatgaaaacattgcaaaggaattagatataccattaataatgattgatactacatttaataatgaaaatgaggtaacagaaaatagaattaaataccttagagctcaatttgaagaggctataaaacaacttgagaaaatttctggaaagaaatttgatcccaagaagtttgaagaagttatgaaaatctccgctgaaaacggtaagctttggaaatattctatgagtttaccatcaggatctttcccatcaccaatgaatggatttgacttatttacttatatggctgttatcgtatgctatagaggtaaaatagaaactacagaagcttttaaattattgatttctgaattagaagataatattagaaataaagcaacttcctttagaggagaagagaaatatagaattatgatggaaggaattccatgctggccatatataggctataagatgagaactttagcaggctatggtgttaatatgactggaagcgtttaccctcatgcttgggcattacagtatgaagtaaacgatttagatggaatggctaaagcttacagtactatgtttaataatgttaacttagaaagaatgtgtaaatacagagtagattctttaatagatggaaattgtgatggagcattctatcatatgaatagaagctgtaaattgatgagttttatacaatatgaaatggaaagacaagtttttcaaaaaacaggcataccatatgcgggcttcgatggagaccaagcagatccaagaaactttagtaaggctcagtttgaaacaagactgcaagggctagtagaagttatggaagaaagaaagaaaggaggaaacaaataaagctgagcaggaggatctacatgaaagcattatctattaaaccagaaatctatacctttgatacatgtaaagaatttataaacaaatttaaaataggaaaagaagatttaattattacaagtgagcatacttatgtttcatatttttctaaatataaccttgataccaatgtaatctttattagaaaatacggcactggagagccaagtgatacaatggtagaagcaatttgtaaggatataaaagatattacttataaaagagtaattgctattggcggcggaagtgtccttgacgtttcaaaattgtttgcattaaagaaagtctcgccagtacttgatttatttgatcacaaattagaatttgtaaaagataaggaattgatcctaattccaacaacttgcggaacaggcagtgaagtaactaatatttctattcttgaattgaagtcaagacatacaaaattaggtcttgctatagatgaactatatgcagattttgctgttatgattccagaacttctagagaatttaccctttaaattttttgcaactagttccattgatgccttgattcattccattgaatccagtgtttcaccaaaagctacaagctatacagaaatgttttcctataaagcaatggaaatgatcttaaaaggatatcaggagatttcaaaaaatggcccagacgccaggttttccttgttagataaatttttacttgcaagcaattatgctggaattgcatttggcaatgcagggtgtggtgcagtacatgctatgagttatcctttaggtgctaattaccatgttcctcatggagaagcaaattatcaaatgttcattggagtatttaaaacctattatcgtttaaaaccacaaggtaaaattacaaaactaaataaattcttagcatccattttaaactgcaaagaaaatgaagtttacattaaaatagaagagttattaaatgtattgattcctaaaaaacaattacgtgagtatggggtaaaagaaaaagaattaaaggaatttacacaaagtgttatgactaaacaaggtcgtttaatggcaaataactatacagaattaaatgaacaaactgtatatgaaatatataaatcattatattaagctcagctagcacccggaattgtgagcggataacaattccttggaattgtgagcggataacaattataattaagttgttaggaggttagaatgttgaaggaacaattacctaaaataataactgataaagtccctggaccgaaagcagaagaagtaatacgaagaagagaagatgcagtaccctctgcaattaaatgtgtatatcctgttgtaataaaaagggcagaaggtgcggtgattgaggatgttgatgaaaattattttcttgactggactggtggtgtaggcgtactaaacgttggattttcccatccagaagtggttgaagctgtgaaagaacagtcagagaagtatttccatggtatgtttaatattgttacacacgaaggatatgttaagctggcagagaaaatgaactccattgttcctgtaaagggaaataagaaaaaaacgtttttcgcaaatagtggagcagaggctgatgaaaatgcagtaaaaatagcaaaagcttttacaaatagacccaatatagttgtattttcaggggcatttcatggacgtacagttatgaccatggcaatgacatcgaaaaaatcttatgcctatggaatgggaccttttccagatggtgtataccgtgcagaatttccgtatttatatagaagtcctgaaggaatgccagagagtgaaaccattaattattatatagaaagtattaaaaaagtatttgatcaagcttcaccaccggagtacgtagcagctatagtagtagaaccacttcagggtgaaggcggatttattccagctcccattgaatgggttaaagcagtaagaactatttgtgataaatatggtatattgcttgttgcagatgaggtacaatgtgggttctgccgtacaggtaaaatgtttgcttctgaatattggaaggaagcaggagcagctccagatataatagcaactgcaaaatctattgcagctggtatgccattaagcgcaataacagcaagggaagagattatggaggcagtaagacccggaacaattggaggaaccttctgtggaaatgcagtagcatgtgcagcagcattaaaagtgatagaaattatggaaagagatcatttggctgaccgttctatggaaataggtaagaaagtaatgaaacgctatatggaatggaaagaaaaatatgagattgttggagatgtaagaggactcggcggaatggttggaatagaatttgtaaaaaacaaagaaaagaaagatccaaatcctgaaattgtatcagcagttattcaagaagcagcccaaaatggacttatgattgagaactcgggtgtttatggaaatgttatccgctttttagcaccacttgtaattacagataagcagcttgaagcaggattagatatttttgaaaaagcaatttctaagtgtatgcaaaagtaagttgaggaggtagataatgagcggcccgaccaccgataccccggcggcgattcagatttgccgcattatgcgcccggatgatgcgaacgtggcgggcaacgtgcatggcggcaccattctgaaaatgattgaagaagcgggcgcgattattagcacccgccattgcaacagccagaacggcgaacgctgcgtggcggcgctggcgcgcgtggaacgcaccgattttctgagcccgatgtgcattggcgaagtggcgcatgtgagcgcggaaattacctataccagcaaacatagcgtggaagtgcaggtgcatgtgatgagcgaaaacattctgaccggcaccaaaaaactgaccaacaaagcgaccctgtggtatgtgccgctgagcctgaaaaacgtggataaagtgctggaagtgccgccgattgtgtatctgcgccaggaacaggaagaagaaggccgcaaacgctatgaagcgcagaaactggaacgcatggaaaccaaatggcgcaacggcgatattgtgcagccggtgctgaacccggaaccgaacaccgtgagctatagccagagcagcctgattcatctggtgggcccgagcgattgcaccctgcatggctttgtgcatggcggcgtgaccatgaaactgatggatgaagtggcgggcattgtggcggcgcgccattgcaaaaccaacattgtgaccgcgagcgtggatgcgattaactttcatgataaaattcgcaaaggctgcgtgattaccattagcggccgcatgacctttaccagcaacaaaagcatggaaattgaagtgctggtggatgcggatccggtggtggataacagccagaaacgctatcgcgcggcgagcgcgttttttacctatgtgagcctgaaccaggaaggcaaaccgatgccggtgccgcagctggtgccggaaaccgaagatgaaaaaaaacgctttgaagaaggcaaaggccgctatctgcagatgaaagcgaaacgccagggccataccgaaccgcagccgtagacgataggaggacgtacatgattgtaaaaccaatggttaggaacaatatttgtctaaacgctcatccgcaaggatgcaaaaaaggcgttgaggatcaaatagagtacacaaaaaagagaattaccgctgaggtaaaagccggagcaaaagcccctaaaaacgtgctggttctcggctgctcgaacggttacggacttgcaagccggataacggcagcattcggctatggggccgccactatcggcgtttcctttgaaaaagccggaagcgaaacaaagtacggcacacccggctggtacaacaacctggcctttgacgaggctgccaaaagggaaggcctttattccgtaactatagacggagacgccttttccgatgaaatcaaggcacaagtaatcgaagaagccaaaaagaaaggaattaaattcgatcttatagtttacagcttggcaagccctgtaagaaccgatcccgacacaggcataatgcacaagtccgtcttaaaacccttcggtaaaacatttacaggcaagacagtcgatccctttacgggagaactaaaagaaatctccgccgaacctgcaaacgatgaagaagccgctgcaaccgttaaggttatgggaggagaagactgggaacgctggataaagcagctttcaaaagaaggtcttttagaagaaggctgcattaccctagcctattcctatatcggccctgaggccactcaagccctctaccgaaagggcaccataggaaaggcaaaagaacaccttgaagcaactgcccaccgcctaaacaaagaaaacccgtcaatacgggccttcgtttcggtgaacaagggcttggtaacaagggcaagtgcggtaatccccgtaattcccctatacctcgcttccttgtttaaggttatgaaagaaaaaggaaaccacgagggctgtatcgagcagattacccgcctttatgccgaaagactctaccgtaaagacggcaccatccccgtcgatgaagaaaacagaatccgtatcgacgactgggagcttgaagaagacgttcaaaaggcggtttcggctttaatggaaaaagtaaccggcgaaaatgccgaaagcctaaccgaccttgcaggctaccgccacgactttttagcctcaaacggctttgatgtagaaggcatcaactacgaagccgaggtagaaaggttcgacaggatttaaaacacaggaggacgataatgacgcgtgaagtggtagtggtaagcggtgtccgtaccgcgatcgggacctttggcggcagcctgaaggatgtggcaccggcggagctgggcgcactggtggtgcgcgaggcgctggcgcgcgcgcaggtgtcgggcgacgatgtcggccacgtggtattcggcaacgtgatccagaccgagccgcgcgacatgtatctgggccgcgtcgcggccgtcaacggcggggtgacgatcaacgcccccgcgctgaccgtgaaccgcctgtgcggctcgggcctgcaggccattgtcagcgccgcgcagaccatcctgctgggcgataccgacgtcgccatcggcggcggcgcggaaagcatgagccgcgcaccgtacctggcgccggcagcgcgctggggcgcacgcatgggcgacgccggcctggtcgacatgatgctgggtgcgctgcacgatcccttccatcgcatccacatgggcgtgaccgccgagaatgtcgccaaggaatacgacatctcgcgcgcgcagcaggacgaggccgcgctggaatcgcaccgccgcgcttcggcagcgatcaaggccggctacttcaaggaccagatcgtcccggtggtgagcaagggccgcaagggcgacgtgaccttcgacaccgacgagcacgtgcgccatgacgccaccatcgacgacatgaccaagctcaggccggtcttcgtcaaggaaaacggcacggtcacggccggcaatgcctcgggcctgaacgacgccgccgccgcggtggtgatgatggagcgcgccgaagccgagcgccgcggcctgaagccgctggcccgcctggtgtcgtacggccatgccggcgtggacccgaaggccatgggcatcggcccggtgccggcgacgaagatcgcgctggagcgcgccggcctgcaggtgtcggacctggacgtgatcgaagccaacgaagcctttgccgcacaggcgtgcgccgtgaccaaggcgctcggtctggacccggccaaggttaacccgaacggctcgggcatctcgctgggccacccgatcggcgccaccggtgccctgatcacggtgaaggcgctgcatgagctgaaccgcgtgcagggccgctacgcgctggtgacgatgtgcatcggcggcgggcagggcattgccgccatcttcgagcgtatctgaacagaggaggacgatacatgagcatcaggacagtgggcatcgtcggtgccggcaccatgggcaatggcatcgcccaggcctgcgcagtggtaggtctcaacgtggtgatggtcgacatcagcgatgccgccgtgcagaagggtgtcgccaccgtggcaagcagcctggaccgtctgatcaagaaggaaaagctgaccgaggccgacaaggccagcgcgctggcgcgcatcaagggcagcacctcgtatgacgatctcaaggccaccgatatcgtgatcgaggccgccaccgagaactacgacctgaaggtcaagatcctcaagcagatcgacggcatcgtcggcgagaacgtgatcatcgcgtccaacacctcgtcgatctcgatcaccaagctggctgccgtgacctcgcgcgccgaccgctttatcggcatgcacttcttcaacccggtgccggtgatggcgctggtggaactgatccgcggcctgcagaccagcgacaccacccacgccgccgtcgaggccctgtcgaagcagctcggcaaatacccgatcacggtcaagaacagcccgggcttcgtcgtcaaccgcatcctgtgcccgatgatcaacgaggccttctgcgtgctgggcgaaggcctggcctcgccggaagagatcgacgaaggcatgaagctgggctgcaaccacccgatcgggccgctggcgctggctgacatgatcggcctggacaccatgctggccgtgatggaagtgctgtacacggagtttgccgatccgaagtaccgcccggcgatgctgatgcgcgagatggtcgctgccggctacctgggccgcaagactggccgcggcgtgtacgtctatagcaagtaaaaaggagtgtatataaatggatggcaaagagtatgttcaaaaagttttaagtactgtacaaaaaagaaatttaggtgaagaagaatttcttgatgcggtaaaagaagttttaacttctttagtacctgtatttgatagaagacctgattttattaaagcaggattacttgaaagattaactgaaccagaaagagctataagttttagagtcccatgggttgatgataatggagaggttcaagtaaacagaggttttagaattcaatttaattcggctataggaccgtataagggtgggttaagatttcatccatctgtaaatcaaagtatcgtaaaatttttaggatttgagcaaatatttaagaactccttaacagggttacctatcggaggagcaaaaggcggttcagattttgatccaaaaggcaaatctgataacgaagttatgagattttgtcaagcttttatgtctgagctgtacaagtacataggttctaatagagatgtacctgcaggagatataggtgtcggtggaagagaaattggatatctatatggctattataataaacttaaaggtgtaagtgaacagggtactttgacaggcaagggactgacttatggaggaagtcttgccagaacagaagcaacaggatatggattagtttattttactgaagaaatgctaaaggatcataatttgagtttcaaagataaaaaagtagtagtttcaggttcgggaaatgtggctatttatgctattgaaaaagcaactgaacttggagctaaagttattacttgttctgattctaatggatatattttagatgaaaatggaattaatctagatgtagtaaaagaaattaaagaagttagaaggggaagaataaaagaatatctaaaaagtgtgcctactgctaagtatgtaccagattttagagaaatttggaatgttaagtgtgacatagctcttccttgtgcaactcaaggtgaaataaatgagaaatctgctaaggctcttgtagaaaatggtgttatagctgtatcagaaggagcaaatatgccgtcaactttagatgcaataaatgtatttttaagtaataagattctttttggaccttctaaggcagctaatgcaggaggagttgcatgttctgctattgaaatgtctcagaatagtataaggtattcatggacatttgaagaggtaaataataagatcaaaaatataatgattaatatttataataattctaaaaacgcggcaaaagaatatggaaatgaaggaaatatagttgtaggagccaatattgctggatttttaaaagttgctgaggctatgatggcccaaggcataatttaaaagacattcgggaggaagaatttaaatgggtttctactctatgcctagatatttccaaaatatgcctcaggtgggcaaacccctgaaaaaggcggatgccgccaatgaagaacagctgaaaaagatcgaagaagagatccatcagctgatcaaagaggctcaggaagccggcaaggcagatgctgatgtaaacaagagaggggaactgaccgctctccagagaattgaaaaactggtggaaccgggctcctggagacccctgaacaccctgttcaaccctcagggcaacaagaacggctccgtggccatcgtcaagggcctgggccgtgtaaacggcaaatggtgcgtggtcgtggcttccgacaacaagaagctggccggtgcctgggtgccaggccaggctgaatgcctgctgcgggcttccgataccgccaagaccctgcacgtgcctctggtgtatgtgctgaactgctccggcgttaagttcgacgaacaggaaaaggtataccccaaccgtcgtggcggcggtacgcctttcttccggaacgctgaactgaaccagctgggcattcccgtcatcgttggcatctacggcaccaaccctgccggcggcggctatcattccatcagccccacggtgatcattgcccatgaaaaagccaacatggctgtgggcggcgccggcattatgggcggcatgaaccccaaaggtcatgtggacctggaatatgccaacgaaatcgccgacatggtggaccgtaccggcaagaccgaacctccgggagctgtcgacatccactacaccgaaaccggtttcatgcgtgaagtctatgcttccgaagaaggcgttctggaagggatcaagaagtatgtaggcatgctgccgaaatacgatcctgaattcttccgggtggacgatccgaaagcaccggcattcccggctgacgacctgtacagcatggttcctctgaacgacaaacgggcttatgacatctacaatgtaattgcccgcctgttcgacaacagcgaactccatgaatacaaaaaaggctacggccctgaaatggtcaccggtctggccaaagtcaacggcctgctggtgggcgttgtggccaacgtccagggtctcctgatgaactaccctgaatacaaggctgcaggctccgtagggatcggcggcaaactgtaccgccagggtctggtgaaaatgaatgaattcgtcaccctgtgcgccagagaccgtctgcccatcgtctggatccaggataccaccgggatcgatgtgggcaacgatgcggaaaaggctgaactgctgggtctgggccagtccctgatctactccatccagacttcccacatccctcaattcgaaattaccctgagaaaaggcacggctgctgcccactacgtactgggcgggcctcagggcaatgacaccaacgccttctccatcggtaccgctgctacggaaatcgccgttatgaacggtgaaaccgctgccaccgccatgtactcccggagactggccaaagaccggaaagccggcaaggatctgcagccgaccatcgacaagatgaacaacctgatccaggctttctacaccaaatctcgtccgaaagtctgtgctgaactgggtctggtggatgaaatcgtggacatgaacaagatccgcgggtatgtggaagccttcacggaagctgcttatcagaatccggaaagcatctgcccgttccatcagatgattctgcctcgtgccatcagagagtttgagactttcgtaaagaaataatccttacaaggaggatctacaatgaccgacaatccttggctgattatgatgatcaacatgaccatcgtattcggtgtgctgattgtgctgggaatcctgatggtgctgatccatgctgtcgatcccaccaagaaagttcagggaaaaaaaaagcctgtagttgctaagccggcgccttccgctgctgccagcaaacggcaggaagaggaaaaagtggctgccatggcagctgtcctggccctggtccaggatgaagacgatatgattgcagctgccctgagtgctgccatcgccgaacacaaaagaaaaatggagccgatgaatctgccccatcattctttctgatgaactgttgagggacggttcattatccacaaaatcaaacaacttgaaaactgtttaggagggattctcatgagaaaattcaatgttaacgttaacggtactgtttacactgtagaagttgaagaagtcggcggcgctgtaactgcagctcctgctgctcctgccgctcctgccgctgctcctgctgccgctcctgtagctgctgctcctgctgctgctcccgctccggctcctgccgctgctcctgctgctgctcccgctccggctgccaaaccggccgctgctgctcctgccggctccgtaaccgtatccgctcccatgcccggcaagatcctgtccgttaacgtaaaacccggcgacaaagtggaagccggcgatgttctgctgatcctggaagctatgaagatgcagaacgaaatcatggctcctgaagacggcacggtttccgaagtccgcgtaaacgctggcgataccgtagccaccggcgacgtaatggttattctctaatcaacgtctccgaacataaaggaggattttagaacatggatgcttttgtggtagccctgacctctgtcatccaggacagtgggtttgtggcttttacctggggcaatgccgtaatgatgctggtcgggtgcatcctgctgtacctggccatcgtcaaaggctttgaacccctgctgctgagcccgatcgccttcgggtgcattctggccaacgtaccccggaccgggttcgaaaccgaccccggcgtcatgcagctgatcctgggcgggatcaaatacgaaatcttccctccgctgattttcatgggcgtaggggccatgaccgactttggtccgctgattgccaaccccaagaccctgctgctgggcgctgctgcccagatcggcgtgttcgtggctctgctgggggccatgctcctgggcttcaatgtgaaggaagcttccgccatcgggatcatcggtggtgctgacggcccgacttccatttacctggcttccaagatggctccccatctgctgggcgccatcgccgtggccgcttattcctacatgtccctggtgcccctgatccagccgcctgtgatgaaactgttcacctccaaggaagaacggaagatcaaaatggcccagctgcgtacggtgacccactttgaaaaagtggtgttccccattgtcaccaccattttcatttccctgctgctgccttccgtatgctctttgatcgggatgctgatgctggggaacctgttcaccgaatccggctgtatggaccgtctgtctgacacggcacagaatgccctgatgaacagcgtgaccatcatgctggccaccggtaccggcctgaccatgaaggccgaaagcttcctgaccttgcagaccatcgaaatcatctgcctgggtctggttgcctttatcggcggcaccgccggcggtgtgctgttcggcaagctgatgagcaagctggacggcggcaagaccaacccgctgattggttctgccggtgtatccgcagtgcctatggctgcccgtgtgtcccaggttgtgggacagcaggctgaccctggcaacttcctgctgatgcacgccatgggccccaatgtggccggggttatcggtacggctgttgcagctggtaccatgctggccatggtgggcggcaaataaagtcaaggaggagcataatggagtgggaagagatatataaagagaaactggtaactgcagaaaaagctgtttcaaaaatagaaaaccatagcagggtagtttttgcacatgcagtaggagaacccgtagatttagtaaatgcactagttaaaaataaggataattatataggactagaaatagttcacatggtagctatgggcaaaggtgaatatacaaaagagggtatgcaaagacattttagacataatgctttatttgtaggcggatgtactagagatgcagtaaattcaggaagagcagattatacaccttgttttttctatgaagtgccaagtttgtttaaagaaaaacgtttgcctgtagatgtagcacttattcaggtaagtgagccagataaatatggctactgcagttttggagtttccaatgactataccaagccagcagcagaaagtgctaagcttgtaattgcagaagtgaataaaaacatgccaagaactcttggagattcttttatacatgtatcagatattgattatatagtggaagcttcacacccattgttagaattgcagcctcctaaattgggagatgtagaaaaagccataggagaaaactgtgcatctttaattgaagatggagctactcttcagcttggaataggtgctataccagatgcggtacttttattcttaaagaacaaaaagaatttaggaatacattctgagatgatatcagatggtgtgatggaactggtgaaggcaggggttatcaataacaagaaaaagaccctccatccaggcaaaatagttgtaacatttttaatgggaacaaaaaaattatatgattttgtaaacaataatccaatggtagaaacttattctgtagattatgtaaataatccactggtaattatgaaaaatgacaatatggtttcaataaattcttgtgttcaagtagacttaatgggacaagtatgttctgaaagtataggattgaaacagataagtggagtgggaggccaggtagattttattagaggagctaatctatcaaagggtggaaaggctattatagctataccttccacagctggaaaaggaaaagtttcaagaataactccacttctagatactggtgctgcagttacaacttctagaaatgaagtagattatgtagttactgaatatggtgttgctcatcttaagggcaaaactttaagaaatagggcaagagctctaataaatatcgctcatccaaaattcagagaatcattaatgaatgaatttaaaaagagattttagagattaaggaggactacgaatgtctttaatgactggggaagaatatgtagaaagtttacgtaaattaaaattaaacgtttattatctgggagagaaaatagataatccagtggataaccctgtacttcgtccatctttaaattctgttaagatgacttatgacttggcccaagaagcagaatatgaggatttaatgacaacaacatcaaatataacaggtgaaaaaataaatagatttacaaatttacatcaaagcagtgaagatttggtaaaaaaagttaaaatgcagagattgtgcggacaaaaaactgcagcctgtttccaaagatgcgttggtatggactcatttaatgcagtgtacagtactacttttgaaatagataaggaatataatacaaattattttgaaaatttcaagaaatttttaacttatgttcaaaagaacgatttaacagtagatggagctatgacagatccaaaaggagacagaggattgtcaccaagcaaacaggctgatccagatttatatttaagagttgtagaaagaagagaagacggtgtagttgtaagaggagcaaaggctcaccagacaggtatatgtaattctcatgaagtattggttatgccaactattgctatgagaccggatgataaagattatgcaatagctttttctgttcctacagatgcagaaggaataactatgataattggaagacagtcctgtgatactagaaaaatggaaaaagatgcggacatagatgttggtaataaagaatttggcggagtagaagcattagtagtatttgacgatgtatttgttccaaatgacaggatattcttaaatggtgaaactgaatatgcaggaatgttagtagagagatttgcaggatatcatagacaaagttatggtggatgcaaagtaggagtgggagatgtattgataggcgctgctgcagtggctgcagactataatggagctgcaaaggcatctcacataaaggataaattaatagaaatgatgcatttaaatgaaactctttacgcttgcggaattgcgtgctcagcagaaggacatgcaacaaaagctggaaattaccaaatagacttgcttcttgcaaatgtatgtaagcaaaatataacaagattcccttatgaaattgtgagattagcagaagatatagcaggaggattaatggttactatgccttctgaaaaggattataagagtccagaggttggaaaatatgtagagaagtacttggtgggagttgcatccgtacctgttgaagacagaatgaagatattaagattattagaaaatatatgtcttggaacggctgcagtaggatatagaactgaatccatgcatggagcaggttcacctcaagcacagagaataatgatatcaagacagggaaacctagcacataagaagaaacttgcaaagaagatagctagaatagaagattaagctatcataaaaataagaagcctgcatttgcaggcttcttatttttat

SEQ ID NO: 56 - DNA, 24350 bp, artificial sequence
  plasmid SG857
agtgagcaataaaaataagaagcctgcatttgcaggcttcttatttttatagaccggggacttatcagccaacctgtaggccagcaaaaggccaggaaccgtaaaaaggccgcgttgctggcgtttttccataggctccgcccccctgacgagcatcacaaaaatcgacgctcaagtcagaggtggcgaaacccgacaggactataaagataccaggcgtttccccctggaagctccctcgtgcgctctcctgttccgaccctgccgcttaccggatacctgtccgcctttctcccttcgggaagcgtggcgctttctcatagctcacgctgtaggtatctcagttcggtgtaggtcgttcgctccaagctgggctgtgtgcacgaaccccccgttcagcccgaccgctgcgccttatccggtaactatcgtcttgagtccaacccggtaagacacgacttatcgccactggcagcagccactggtaacaggattagcagagcgaggtatgtaggcggtgctacagagttcttgaagtggtggcctaactacggctacactagaagaacagtatttggtatctgcgctctgctgaagccagttaccttcggaaaaagagttggtagctcttgatccggcaaacaaaccaccgctggtagcggtggtttttttgtttgcaagcagcagattacgcgcagaaaaaaaggatctcaagaagatcctttgatcttttctacggggtctgacgctcagtggaacgaaaactcacgttaagggattttggtcatgagattatcaaaaaggatcttcacctagatccttttaaattaaaaatgaagttttaaatcaatctaaagtatatatgagtaaacttggtctgacagactcttcctttttcaatattattgaagcatttatcagggttattgtctcatgagcggatacatatttgaatgtatttagaaaaataaacaaataggggttccgcgcacatttccccgaaaagtgccacctgacggtcctgcaggtaatacgactcactatagggataacttaaatttatattttttactttataatatataattgattatagaatccaaattagataggaggaccaggtaaatggagaataattttattgtcaacgaaaacgagaaaagggttttaaagcagatatttaacaactccaatatcagtagaactcaaatttccaagaatttagaactgaataaagcaacaatttcgaacattcttaacaatctaaagcataaaagtttggtaaatgaagttggtgaaggaaattctactaaaagtggtggaagaaaacctatacttctcgaaattaatcaaaagtatgggtattatataagcatggatttgacatatgattctgttgagttaatgtataactattttgatgctacaattctcaaacaagatagttatgaactgaatgataagaatgtaagtagcatattacagatactcaaatctaacataaatgttagcgaaaaatacgacacattatacggtttattagggataagtatatccatacatgggattgtagatgatgaacaaaacatcattaatctaccatttcacaagaatgaaaaaagaacgtttactgatgaacttaagtctttcactaatgtaccagtggttattgaaaatgaggcaaatttaagtgcattatacgagaaaagtttatacatcaattcgaatattaacaacttgatcacattgtctatacataaaggtataggagctggcatcataatcaataagaaactctatagaggtagtaatggagaagctggagaaataggaaagactcttgttttagagtctatcaataacaatgataacaagtactataaaatagaggatatttgtagtcaagacgctttgatacaaaagattaataacagattaggagttacacttacatttaccgaactaatacagtattataacgaaggaaatagtattgtagctcatgaaatcaaacagtttatcaacaaaatgactgtcttaatacacaatcttaatactcagtttaatccagatgcaatatacatcaattgtcccttgattaatgaacttcctaatattctaaacgaaatcaaagaacaattctcttgtttttcacaaggaagtcctatacaattgcatttaaccactaatgttaaacaagctacattattaggtggaacattagcaattatgcagaaaacccttaacataaacaatatccaaatgaatattaaatagttacagcagtctgagttataaaatagatatctcggaccgtctattcttccttatttgagtgggtaccaatgaaatctttcgagctaaatcgatttctggcccactcttttttattttttagtaagcgtttacaaaaaatgaacaatgtgctatattacctctaaagttagtttgtttattaaattaaccaactaaaatgtcgggatccttactgcaataggttgctactgttttatcatgaatcatcaacgaatgtattttgcatatttcagtatctttaataaactctttgcaatttttacaagttttcatatacgcccttcttttcataaattaatttatgaattctatgtattccaaggagcttttggatccaattaggaggaatctgcgatggaaaaaaaggaatttcgtgttttgataaaatactgttttctgaagggaaaaaatacggtggaagcaaaaacttggcttgataatgagtttccggactctgccccagggaaatcaacaataattgattggtatgcaaaattcaagcgtggtgaaatgagcacggaggacggtgaacgcagtggacgcccgaaagaggtggttaccgacgaaaacatcaaaaaaatccacaaaatgattttgaatgaccgtaaaatgaagttgatcgagatagcagaggccttaaagatatcaaaggaacgtgttggtcatatcattcatcaatatttggatatgcggaagctctgtgcaaaatgggtgccgcgcgagctcacatttgaccaaaaacaacaacgtgttgatgattctgagcggtgtttgcagctgttaactcgtaatacacccgagtttttccgtcgatatgtgacaatggatgaaacatggctccatcactacactcctgagtccaatcgacagtcggctgagtggacagcgaccggtgaaccgtctccgaagcgtggaaagactcaaaagtccgctggcaaagtaatggcctctgttttttgggatgcgcatggaataatttttatcgattatcttgagaagggaaaaaccatcaacagtgactattatatggcgttattggagcgtttgaaggtcgaaatcgcggcaaaacggccccacatgaagaagaaaaaagtgttgttccaccaagacaacgcaccgtgccacaagtcattgagaacgatggcaaaaattcatgaattgggcttcgaattgcttccccacccaccgtattctccagatctggcccccagcgactttttcttgttctcagacctcaaaaggatgctcgcagggaaaaaatttggctgcaatgaagaggtgatcgccgaaactgaggcctattttgaggcaaaaccgaaggagtactaccaaaatggtatcaaaaaattggaaggtcgttataatcgttgtatcgctcttgaagggaactatgttgaataagaattccttaattaaggagctcgataaaaataagaagcctgcatttgcaggcttcttatttttatggtcatagctgtttcctggcgcgccgccattatttttttgaacaattgacaattcatttcttattttttattaagtgatagtcaaaaggcataacagtgctgaatagaaagaaatttacagaaaagaaaattatagaatttagtatgattaattatactcatttatgaatgtttaattgaatacaaaaaaaaatacttgttatgtattcaattacgggttaaaatatagacaagttgaaaaatttaataaaaaaataagtcctcagctcttatatattaagctaccaacttagtatataagccaaaacttaaatgtgctaccaacacatcaagccgttagagaactctatctatagcaatatttcaaatgtaccgacatacaagagaaacattaactatatatattcaatttatgagattatcttaacagatataaatgtaaattgcaataagtaagatttagaagtttatagcctttgtgtattggaagcagtacgcaaaggcttttttatttgataaaaattagaagtatatttattttttcataattaatttatgaaaatgaaagggggtgagcaaagtgacagaggaaagcagtatcttatcaaataacaaggtattagcaatatcattattgactttagcagtaaacattatgacttttatagtgcttgtagctaagtagtacgaaagggggagctttaaaaagctccttggaatacatagaattcataaattaatttatgaaaagaagggcgtatatgaaaacttgtaaaaattgcaaagagtttattaaagatactgaaatatgcaaaatacattcgttgatgattcatgataaaacagtagcaacctattgcagtaaatacaatgagtcaagatgtttacataaagggaaagtccaatgtattaattgttcaaagatgaaccgatatggatggtgtgccataaaaatgagatgttttacagaggaagaacagaaaaaagaacgtacatgcattaaatattatgcaaggagctttaaaaaagctcatgtaaagaagagtaaaaagaaaaaataatttatttattaatttaatattgagagtgccgacacagtatgcactaaaaaatatatctgtggtgtagtgagccgatacaaaaggatagtcactcgcattttcataatacatcttatgttatgattatgtgtcggtgggacttcacgacgaaaacccacaataaaaaaagagttcggggtagggttaagcatagttgaggcaactaaacaatcaagctaggatatgcagtagcagaccgtaaggtcgttgtttaggtgtgttgtaatacatacgctattaagatgtaaaaatacggataccaatgaagggaaaagtataatttttggatgtagtttgtttgttcatctatgggcaaactacgtccaaagccgtttccaaatctgctaaaaagtatatcctttctaaaatcaaagtcaagtatgaaatcataaataaagtttaattttgaagttattatgatattatgtttttctattaaaataaattaagtatatagaatagtttaataatagtatatacttaatgtgataagtgtctgacagtgtcacagaaaggatgattgttatggattataagcggccggccagtgggcaagttgaaaaattcacaaaaatgtggtataatatctttgttcattagagcgataaacttgaatttgagagggaacttagatggtatttgaaaaaattgataaaaatagttggaacagaaaagagtattttgaccactactttgcaagtgtaccttgtacctacagcatgaccgttaaagtggatatcacacaaataaaggaaaagggaatgaaactatatcctgcaatgctttattatattgcaatgattgtaaaccgccattcagagtttaggacggcaatcaatcaagatggtgaattggggatatatgatgagatgataccaagctatacaatatttcacaatgatactgaaacattttccagcctttggactgagtgtaagtctgactttaaatcatttttagcagattatgaaagtgatacgcaacggtatggaaacaatcatagaatggaaggaaagccaaatgctccggaaaacatttttaatgtatctatgataccgtggtcaaccttcgatggctttaatctgaatttgcagaaaggatatgattatttgattcctatttttactatggggaaatattataaagaagataacaaaattatacttcctttggcaattcaagttcatcacgcagtatgtgacggatttcacatttgccgttttgtaaacgaattgcaggaattgataaatagttaacttcaggtttgtctgtaactaaaaacaagtatttaagcaaaaacatcgtagaaatacggtgttttttgttaccctaagtttactctatcattgatagagtgcgactctatcattgatagagtccacaggttggctgataagtccccggtctgtaccgttcgtataatgtatgctatacgaagttataggaggttataatgaacgagaaaaatataaaacacagtcaaaactttattacttcaaaacataatatagataaaataatgacaaatataagattaaatgaacatgataatatctttgaaatcggctcaggaaaagggcattttacccttgaattagtacagaggtgtaatttcgtaactgccattgaaatagaccataaattatgcaaaactacagaaaataaacttgttgatcacgataatttccaagttttaaacaaggatatattgcagtttaaatttcctaaaaaccaatcctataaaatatttggtaatataccttataacataagtacggatataatacgcaaaattgtttttgatagtatagctgatgagatttatttaatcgtggaatacgggtttgctaaaagattattaaatacaaaacgctcattggcattatttttaatggcagaagttgatatttctatattaagtatggttccaagagaatattttcatcctaaacctaaagtgaatagctcacttatcagattaaatagaaaaaaatcaagaatatcacacaaagataaacagaagtataattatttcgttatgaaatgggttaacaaagaatacaagaaaatatttacaaaaaatcaatttaacaattccttaaaacatgcaggaattgacgatttaaacaatattagctttgaacaattcttatctcttttcaatagctataaattatttaataagtaagttaagggatgcataaactgcatcccttaacttgtttttcgtgtacctattttttgtgaatcgattatgtcttttgcgcattcgtcgacaattgcatatattgataaaaataataatagtgggtataattaagttgttaggaggttagttagaatgagtagactcgataagtctaaagtgataaattccgcattagaactccttaatgaagttggaattgaaggtctaactaccaggaaattagctcagaaacttggagttgaacaaccaacattgtactggcatgtcaaaaacaaaagagcactcttagatgcattagcaatcgaaatgttagacagacatcatacacacttttgtccattagaaggtgaaagttggcaagactttttgaggaataacgcgaaaagtttcagatgtgctttactatcccatagagatggggctaaagttcacttaggaactagacctacagaaaagcagtatgagacacttgaaaatcagttggcatttctatgtcaacaaggattctcattagagaacgcattatatgctctttcagctgtaggtcatttcacgttaggttgtgttttggaagatcaagaacatcaagttgcaaaagaagagagagaaactcctactacagatagtatgccacctttattacgacaagctatagaactgtttgatcatcaaggagctgaacctgcgtttctctttggattggagttaataatttgcggactagagaaacagcttaagtgtgaaagtggatcttagttagcaccggtcagggtggtgaatgtgaaaccagtaacgttatacgatgtcgcagagtatgccggtgtctcttatcagaccgtttcccgcgtggtgaaccaggccagccacgtttctgcgaaaacgcgggaaaaagtggaagcggcgatggcggagctgaattacattcccaaccgcgtggcacaacaactggcgggcaaacagtcgttgctgattggcgttgccacctccagtctggccctgcacgcgccgtcgcaaattgtcgcggcgattaaatctcgcgccgatcaactgggtgccagcgtggtggtgtcgatggtagaacgaagcggcgtcgaagcctgtaaagcggcggtgcacaatcttctcgcgcaacgcgtcagtgggctgatcattaactatccgctggatgaccaggatgccattgctgtggaagctgcctgcactaatgttccggcgttatttcttgatgtctctgaccagacacccatcaacagtattattttctcccatgaagacggtacgcgactgggcgtggagcatctggtcgcattgggtcaccagcaaatcgcgctgttagcgggcccattaagttctgtctcggcgcgtctgcgtctggctggctggcataaatatctcactcgcaatcaaattcagccgatagcggaacgggaaggcgactggagtgccatgtccggttttcaacaaaccatgcaaatgctgaatgagggcatcgttcccactgcgatgctggttgccaacgatcagatggcgctgggcgcaatgcgcgccattaccgagtccgggctgcgcgttggtgcggacatctcggtagtgggatacgacgataccgaagacagctcatgttatatcccgccgttaaccaccatcaaacaggattttcgcctgctggggcaaaccagcgtggaccgcttgctgcaactctctcagggccaggcggtgaagggcaatcagctgttgcccgtctcactggtgaaaagaaaaaccaccctggcgcccaatacgcaaaccgcctctccccgcgcgttggccgattcattaatgcagctggcacgacaggtttcccgactggaaagcgggcagtgagcgcaacgcaattaatgtaagttagctcactcattaggcaccgggatctcgaccgatgcccttgagagccttcaacccagtcagctccttccggtgggcgcggggcatgactagcatgatcgtgctcctgtcgttgaggacccggctaggctggcggggttgccttactggttagcagaatgaatcaccgatacgcgataacttcgtataatgtatgctatacgaacggtagctcagctagcacccggaattgtgagcggataacaattccttggaattgtgagcggataacaattataattaagttgttaggaggttagaatgagtctgaatttccttgattttgaacagccgattgcagagctggaagcgaaaatcgattctctgactgcggttagccgtcaggatgagaaactggatattaacatcgatgaagaagtgcatcgtctgcgtgaaaaaagcgtagaactgacacgtaaaatcttcgccgatctcggtgcatggcagattgcgcaactggcacgccatccacagcgtccttataccctggattacgttcgcctggcatttgatgaatttgacgaactggctggcgaccgcgcgtatgcagacgataaagctatcgtcggtggtatcgcccgtctcgatggtcgtccggtgatgatcattggtcatcaaaaaggtcgtgaaaccaaagaaaaaattcgccgtaactttggtatgccagcgccagaaggttaccgcaaagcactgcgtctgatgcaaatggctgaacgctttaagatgccaatcatcacctttatcgacaccccgggggcttatccgggcgtgggcgcagaagagcgcggtcagtctgaagccattgcacgcaacctgcgtgaaatgtctcgccttagcgtaccgactatttgtaccgttatcggtgaaggtggttctggcggcgcgctggcgattggcgtgggcgataaagtgaatatgctgcaatacagcacctattccgttatctcgccggaaggttgtgcgtccattctgtggaagagcgctgataaagcgccgctggcggctgaagcgatgggtatcatcgctccgcgtctgaaagaactaaaactgatcgactccatcatcccagaaccgctgggtggtgctcaccgtaacccggaagcgatggcggcatcgttgaaagcgcaactgttggcggatctggccgatctcgacgtgttaagcactgaagatttaaaaaatcgtcgttatcagcgcctgatgagctacggttacgcgtaataaggaggaacccactcatggatattcgtaagattaaaaaactgatcgagctggttgaagaatcaggcatctccgaactggaaatttctgaaggcgaagagtcagtacgcattagccgtgcagctcctgccgcaagtttccctgtgatgcaacaagcttacgctgcaccaatgatgcagcagccagctcaatctaacgcagccgctccggcgaccgttccttccatggaagcgccagcagcagcggaaatcagtggtcacatcgtacgttccccgatggttggtactttctaccgcaccccaagcccggacgcaaaagcgttcatcgaagtgggtcagaaagtcaacgtgggcgataccctgtgcatcgttgaagccatgaaaatgatgaaccagatcgaagcggacaaatccggtaccgtgaaagcaattctggtcgaaagtggacaaccggtagaatttgacgagccgctggtcgtcatcgagtaacgaggcgaacatgctggataaaattgttattgccaaccgcggcgagattgcattgcgtattcttcgtgcctgtaaagaactgggcatcaagactgtcgctgtgcactccagcgcggatcgcgatctaaaacacgtattactggcagatgaaacggtctgtattggccctgctccgtcagtaaaaagttatctgaacatcccggcaatcatcagcgccgctgaaatcaccggcgcagtagcaatccatccgggttacggcttcctctccgagaacgccaactttgccgagcaggttgaacgctccggctttatcttcattggcccgaaagcagaaaccattcgcctgatgggcgacaaagtatccgcaatcgcggcgatgaaaaaagcgggcgtcccttgcgtaccgggttctgacggcccgctgggcgacgatatggataaaaaccgtgccattgctaaacgcattggttatccggtgattatcaaagcctccggcggcggcggcggtcgcggtatgcgcgtagtgcgcggcgacgctgaactggcacaatccatctccatgacccgtgcggaagcgaaagctgctttcagcaacgatatggtttacatggagaaatacctggaaaatcctcgccacgtcgagattcaggtactggctgacggtcagggcaacgctatctatctggcggaacgtgactgctccatgcaacgccgccaccagaaagtggtcgaagaagcgccagcaccgggcattaccccggaactgcgtcgctacatcggcgaacgttgcgctaaagcgtgtgttgatatcggctatcgcggtgcaggtactttcgagttcctgttcgaaaacggcgagttctatttcatcgaaatgaacacccgtattcaggtagaacacccggttacagaaatgatcaccggcgttgacctgatcaaagaacagctgcgtatcgctgccggtcaaccgctgtcgatcaagcaagaagaagttcacgttcgcggccatgcggtggaatgtcgtatcaacgccgaagatccgaacaccttcctgccaagtccgggcaaaatcacccgtttccacgcacctggcggttttggcgtacgttgggagtctcatatctacgcgggctacaccgtaccgccgtactatgactcaatgatcggtaagctgatttgctacggtgaaaaccgtgacgtggcgattgcccgcatgaagaatgcgctgcaggagctgatcatcgacggtatcaaaaccaacgttgatctgcagatccgcatcatgaatgacgagaacttccagcatggtggcactaacatccactatctggagaaaaaactcggtcttcaggaaaaataatataggaggatataacatgagctggattgaacgaattaaaagcaacattactcccacccgcaaggcgagcattcctgaaggggtgtggactaagtgtgatagctgcggtcaggttttataccgcgctgagctggaacgtaatcttgaggtctgtccgaagtgtgaccatcacatgcgtatgacagcgcgtaatcgcctgcatagcctgttagatgaaggaagccttgtggagctgggtagcgagcttgagccgaaagatgtgctgaagtttcgtgactccaagaagtataaagaccgtctggcatctgcgcagaaagaaaccggcgaaaaagatgcgctggtggtgatgaaaggcactctgtatggaatgccggttgtcgctgcggcattcgagttcgcctttatgggcggttcaatggggtctgttgtgggtgcacgtttcgtgcgtgccgttgagcaggcgctggaagataactgcccgctgatctgcttctccgcctctggtggcgcacgtatgcaggaagcactgatgtcgctgatgcagatggcgaaaacctctgcggcactggcaaaaatgcaggagcgcggcttgccgtacatctccgtgctgaccgacccgacgatgggcggtgtttctgcaagtttcgccatgctgggcgatctcaacatcgctgaaccgaaagcgttaatcggctttgccggtccgcgtgttatcgaacagaccgttcgcgaaaaactgccgcctggattccagcgcagtgaattcctgatcgagaaaggcgcgatcgacatgatcgtccgtcgtccggaaatgcgcctgaaactggcgagtattctggcgaagttgatgaatctgccagcgccgaatcctgaagcgccgcgtgaaggcgtagtggtacccccggtaccggatcaggaacctgaggcctgagactaggaggatcttaaaaaggagtgtatataaatgagtttaacacaaggcatgaaagcaaaacagttgttagcctactttcagggaaaggctgatcaagatgcaagagaagcaaaagcaagaggcgaacttgtttgttggtctgcttccgtagctccccctgaattctgcgtgacaatgggtatcgcaatgatttatcctgagacccacgcagcaggtattggcgcaagaaaaggcgcaatggacatgttggaagttgctgatagaaaaggctacaatgttgactgctgttcttacggcagagtaaacatgggttacatggaatgcctgaaggaagctgcaattacaggtgtaaaacctgaggttttggtcaactctcctgcagcagacgttcctctgcctgacttggtaatcacatgtaataacatttgtaatacattgttgaaatggtatgaaaaccttgcggcagaattagacattccttgcatcgttatcgacgttcctttcaaccacacaatgcctattcctgaatatgcaaaagcttacattgcagatcagtttagaaatgcaatttctcagctggaagtaatctgtggtagaccttttgactggaagaagtttaaagaagttaaagatcagacacagcgttctgtataccactggaacagaattgcagaaatggctaaatataaaccatcacctttgaatggcttcgacttgtttaattacatggcattgatcgttgcttgccgttctttggattatgctgaaattacattcaaagcatttgctgatgaattagaagaaaacttgaaggctggtatctatgcattcaagggcgctgaaaagactcgtttccaatgggaaggtattgctgtatggcctcacttgggtcacacattcaagtccatgaagaacctcaattctatcatgacaggtacagcttaccctgcactttgggatttgcactatgatgcaaacgatgaatctatgcactctatggcagaagcttatacaagaatttatattaacacatgcttacagaacaaagttgaagttttgttgggcatcatggaaaaaggccaggttgacggtacagtttatcacttgaacagaagctgtaagttgatgagcttcctgaacgttgaaacagctgaaattatcaaagaaaagaatggtttgccttatgtaagcatcgatggtgaccagacagatcctcgcgtattctctcccgcacagtttgatacacgtgttcaggcactggttgaaatgatggaagccaacatggctgcagcagaataaatcacaaggaggatcacatgagtagagtagaagctattttatcccaattaaaagacgttgccgcaaatcctaaaaaggcaatggatgattataaggcggaaacaggtaagggtgcagtaggtattatgcctatttactcccctgaagaaatggtacacgcagctggttatttgcctatgggtatctggggtgcacaaggtaaaacaatttccaaggctcgtacatatcttcctgcatttgcttgttcagttatgcagcaggttatggaactgcagtgtgaaggcgcttatgatgacctttctgctgtaattttctctgtaccttgtgatacattaaagtgcttaagccagaaatggaaaggcacatcccctgtaattgtatttacacatcctcagaacagaggcttggaagctgcaaatcagttcttagtaacagagtatgaattggtaaaggctcagcttgaatcagttttgggtgtaaaaatttcaaacgctgctttggagaattccattgcaatttacaatgaaaacagagcagttatgcgtgaatttgtaaaggttgcagctgattaccctcaggtaattgatgcagttagccgtcatgctgttttcaaagcaagacagttcatgttaaaagaaaaacacacagcacttgtaaaagagctcattgctgaaattaaggctacacctgttcagccttgggatggcaagaaagttgttgttacaggtatcttacttgagcccaacgaattgcttgatatcttcaatgaattcaaaattgctatcgttgatgacgatttggctcaggaatccagacagattcgtgttgacgttctggatggcgaaggtggccctctttatagaatggcaaaagcttggcagcaaatgtacggttgctctcttgcaactgatacaaagaaaggccgcggcagaatgctgatcaacaagacaattcagacaggtgcagatgctatcgttgttgcgatgatgaaattctgtgatcctgaagaatgggattaccctgtaatgtacagagaatttgaagaaaaaggcgttaagagtctgatgatcgaagttgatcaggaagtttcttccttcgaacagatcaagacaagactgcagtctttcgtagaaatgctgtaaagtataggaggactacatgagcggaacaggacgactggcaggaaagattgcgttaattaccggtggcgccggcaatatcggcagtgaattgacacgtcgctttctcgcagagggagcgacggtcattattagtggacggaatcgggcgaagttgaccgcactggccgaacggatgcaggcagaggcaggagtgccggcaaagcgcatcgatctcgaagtcatggatgggagtgatccggtcgcggtacgtgccggtatcgaagcgattgtggcccgtcacggccagatcgacattctggtcaacaatgcaggaagtgccggtgcccagcgtcgtctggccgagattccactcactgaagctgaattaggccctggcgccgaagagacgcttcatgccagcatcgccaatttacttggtatgggatggcatctgatgcgtattgcggcacctcatatgccggtaggaagtgcggtcatcaatgtctcgaccatcttttcacgggctgagtactacgggcggattccgtatgtcacccctaaagctgctcttaatgctctatctcaacttgctgcgcgtgagttaggtgcacgtggcatccgcgttaatacgatctttcccggcccgattgaaagtgatcgcatccgtacagtgttccagcgtatggatcagctcaaggggcggcccgaaggcgacacagcgcaccattttttgaacaccatgcgattgtgtcgtgccaacgaccagggcgcgcttgaacgtcggttcccctccgtcggtgatgtggcagacgccgctgtctttctggccagtgccgaatccgccgctctctccggtgagacgattgaggttacgcacggaatggagttgccggcctgcagtgagaccagcctgctggcccgtactgatctgcgcacgattgatgccagtggccgcacgacgctcatctgcgccggcgaccagattgaagaggtgatggcgctcaccggtatgttgcgtacctgtgggagtgaagtgatcatcggcttccgttcggctgcggcgctggcccagttcgagcaggcagtcaatgagagtcggcggctggccggcgcagactttacgcctcccattgccttgccactcgatccacgcgatccggcaacaattgacgctgtcttcgattgggccggcgagaataccggcgggattcatgcagcggtgattctgcctgctaccagtcacgaaccggcaccgtgcgtgattgaggttgatgatgagcgggtgctgaattttctggccgatgaaatcaccgggacaattgtgattgccagtcgcctggcccgttactggcagtcgcaacggcttacccccggcgcacgtgcgcgtgggccgcgtgtcatttttctctcgaacggtgccgatcaaaatgggaatgtttacggacgcattcaaagtgccgctatcggtcagctcattcgtgtgtggcgtcacgaggctgaacttgactatcagcgtgccagcgccgccggtgatcatgtgctgccgccggtatgggccaatcagattgtgcgcttcgctaaccgcagccttgaagggttagaatttgcctgtgcctggacagctcaattgctccatagtcaacgccatatcaatgagattaccctcaacatccctgccaacattagcgccaccaccggcgcacgcagtgcatcggtcggatgggcggaaagcctgatcgggttgcatttggggaaagttgccttgattaccggtggcagcgccggtattggtgggcagatcgggcgcctcctggctttgagtggcgcgcgcgtgatgctggcagcccgtgatcggcataagctcgaacagatgcaggcgatgatccaatctgagctggctgaggtggggtataccgatgtcgaagatcgcgtccacattgcaccgggctgcgatgtgagtagcgaagcgcagcttgcggatcttgttgaacgtaccctgtcagcttttggcaccgtcgattatctgatcaacaacgccgggatcgccggtgtcgaagagatggttatcgatatgccagttgagggatggcgccataccctcttcgccaatctgatcagcaactactcgttgatgcgcaaactggcgccgttgatgaaaaaacagggtagcggttacatccttaacgtctcatcatactttggcggtgaaaaagatgcggccattccctaccccaaccgtgccgattacgccgtctcgaaggctggtcagcgggcaatggccgaagtctttgcgcgcttccttggcccggagatacagatcaatgccattgcgccgggtccggtcgaaggtgatcgcttgcgcggtaccggtgaacgtcccggcctctttgcccgtcgggcgcggctgattttggagaacaagcggctgaatgagcttcacgctgctcttatcgcggctgcgcgcaccgatgagcgatctatgcacgaactggttgaactgctcttacccaatgatgtggccgcactagagcagaatcccgcagcacctaccgcgttgcgtgaactggcacgacgttttcgcagcgaaggcgatccggcggcatcatcaagcagtgcgctgctgaaccgttcaattgccgctaaattgctggctcgtttgcataatggtggctatgtgttgcctgccgacatctttgcaaacctgccaaacccgcccgatcccttcttcacccgagcccagattgatcgcgaggctcgcaaggttcgtgacggcatcatggggatgctctacctgcaacggatgccgactgagtttgatgtcgcaatggccaccgtctattaccttgccgaccgcaatgtcagtggtgagacattccacccatcaggtggtttgcgttacgaacgcacccctaccggtggcgaactcttcggcttgccctcaccggaacggctggcggagctggtcggaagcacggtctatctgataggtgaacatctgactgaacaccttaacctgcttgcccgtgcgtacctcgaacgttacggggcacgtcaggtagtgatgattgttgagacagaaaccggggcagagacaatgcgtcgcttgctccacgatcacgtcgaggctggtcggctgatgactattgtggccggtgatcagatcgaagccgctatcgaccaggctatcactcgctacggtcgcccagggccggtcgtctgtacccccttccggccactgccgacggtaccactggtcgggcgtaaagacagtgactggagcacagtgttgagtgaggctgaatttgccgagttgtgcgaacaccagctcacccaccatttccgggtagcgcgcaagattgccctgagtgatggtgccagtctcgcgctggtcactcccgaaactacggctacctcaactaccgagcaatttgctctggctaacttcatcaaaacgacccttcacgcttttacggctacgattggtgtcgagagcgaaagaactgctcagcgcattctgatcaatcaagtcgatctgacccggcgtgcgcgtgccgaagagccgcgtgatccgcacgagcgtcaacaagaactggaacgttttatcgaggcagtcttgctggtcactgcaccactcccgcctgaagccgatacccgttacgccgggcggattcatcgcggacgggcgattaccgtgtaaaatcataggaggatcaacatgtttatgcgatatattatggttgaggaacagaccctgaagaccgggtcacaggaactagaggagaaggcagactataacatgagatattacgctcacctcatgaagttgagtaaggaaaaacctgcagagttctggggatctctagcacaggacctgctagactggtatgagccttggaaggagaccatgagacaggaagacccgatgacaaggtggttcataggaggtaagataaatgcctcgtacaacgctgtcgacagacacctcaacggccccagaaagttcaaggctgcggtcatctgggaaagtgagttaggggaaaggaagatcgtgacgtatcaggacatgttctatgaggttaataggtgggccaatgcgctcagatccctaggagttggtaaaggggatagggtgaccatatacatgcccctgaccccagagggaatagctgcaatgctggcctcggccaggataggtgcaattcatagcgtaatatttgccggctttggttcgcaagccatagccgacagggttgaggacgccaaggcgaaggtagtgatcactgctgacgcctatcccagaaggggaaaggttgtggagttaaagaagactgtcgacgaggccttaaactcccttggagaaaggagcccagtacagcacgtgctcgtgtataggaggatgaaaacggatgtaaacatgaaggagggaagagacgttttcttcgacgaggtcggcaagtacaggtacgtggagcctgaaaggatggactccaatgatccactcttcattctctacacctctgggaccaccggtaaacctaagggaattatgcactctaccggtggttatctgaccgggacagccgttatgctactgtggagctacggccttagccaggagaacgacgttctcttcaacacctcagatattggttggatagttggccactcctacattacctattccccccttatcatggggagaacggttgtcatttacgagagcgccccagactatccctacccagacaagtgggctgagattattgagagatacagggcaaccactttcggcacctcagctacagccttgcgttacttcatgaagtatggggacgaatacgtgaagaaccacgatctctcgtccatcaggataattgtgacgaacggggaagtgcttaactactctccgtggaagtgggggctagaagtgttaggtggaggaaaggtattcatgtcccatcagtggtggcaaactgagacaggcgcaccgaacctgggctaccttccgggtataatttacatgccaatgaagtcgggtccagcctcaggcttccctctacccggtaacttcgtggaggttctggacgagaacggaaatccctctgcccctagagtgagaggataccttgtaatgaggccacccttcccgcctaacatgatgatggggatgtggaacgataatggggagaggttgaagaagacgtactttagcaagttcggttccctgtattatccaggagacttcgccatggtggatgaggatggatacatctgggtgttgggtagggcagacgagactctaaaaattgcagcccacagaattggagctggggaagtggaatcagcaatcacttctcacccatcggttgccgaggcagcagtcataggcgtgccagactcagtgaaaggagaagaggttcacgcgttcgttgtgctaaagcaaggttacgctccttcctctgaactggctaaggacatacagtcacacgttaggaaggtcatggggcccattgttagtccgcagattcatttcgtggataagttgcctaagacaaggtctgggaaggtcatgagaagggtgataaaggcagtgatgatgggttcgagtgctggcgacttaaccaccatagaggacgaagcatcaatggacgaaataaagaaggctgtcgaggaactaaagaaggagttaaagacctcctagacatcgaaggaggactactatggaatttgaaacaatagaaactaaaaaagaaggaaacttgttctggattacgttaaatagacccgataaactaaacgcactaaacgctaaattacttgaggagttagatagggcagtctctcaggcagagtctgacccagagattagggttatcatcattacagggaaaggaaaggccttctgcgcaggggctgacataacccagtttaaccagttaaccccagcagaagcctggaaattctctaagaaaggaagagagatcatggacaagatagaggcactgagcaaacccaccattgccatgatcaatggatatgcccttgggggtggactagagctagccttagcctgtgatataaggatcgcagcggaggaggcccaactaggccttccagagataaacctagggatatatccggggtatggggggactcagaggttaaccagagttataggaaagggaagagccctggagatgatgatgacgggcgatcgtattcctggtaaggatgctgagaaatatggtctcgtgaatagggttgtccccctagctaacttggagcaagagacaaggaagctggcagaaaagatagccaagaagtctcctatctctctcgccttaatcaaggaagttgtaaacaggggactagactctcccctactgtcaggtctagcgttggaaagcgtaggatggggagtcgtgttttctacggaggacaagaaggagggggtaagtgccttcctggagaagagagagcctacgtttaagggaaaatagaactagaggaggactactatgctcctatttccaagaagaactaatatagcctttttcaaaacaacaggcatttttgctaattttcctttgctaggtagaaccattacaacttcaccatctttccttacacataaactgtcaaaggaagtaaccagggcatcaacttcgcctccaagaccaaagagaattgttgtcgcaattactggtgcgactggtgttgcactgggaatcagacttctacaagtgctaaaagagttgagcgtagaaacccatttggtgatttcaaaatggggtgcagcaacaatgaaatatgaaacagattgggaaccgcatgacgtggcggccttggcaaccaagacatactctgttcgtgatgtttctgcatgcatttcgtccggatctttccagcatgatggtatgattgttgtgccctgttccatgaaatcactagctgctattagaatcggttttacagaggatttaattacaagagctgccgatgtttcgattaaagagaatcgtaagttactactggttactcgggaaacccctttatcttccatccatcttgaaaacatgttgtctttatgcagggcaggtgttataatttttcctccggtacctgcgttttatacaagacccaagagccttcatgacctattagaacaaagtgttggcaggatcctagactgctttggcatccacgctgacacttttcctcgttgggaaggaataaaaagcaagtaacttacaggaggatcacaagatgacgcgtgaagtggtagtggtaagcggtgtccgtaccgcgatcgggacctttggcggcagcctgaaggatgtggcaccggcggagctgggcgcactggtggtgcgcgaggcgctggcgcgcgcgcaggtgtcgggcgacgatgtcggccacgtggtattcggcaacgtgatccagaccgagccgcgcgacatgtatctgggccgcgtcgcggccgtcaacggcggggtgacgatcaacgcccccgcgctgaccgtgaaccgcctgtgcggctcgggcctgcaggccattgtcagcgccgcgcagaccatcctgctgggcgataccgacgtcgccatcggcggcggcgcggaaagcatgagccgcgcaccgtacctggcgccggcagcgcgctggggcgcacgcatgggcgacgccggcctggtcgacatgatgctgggtgcgctgcacgatcccttccatcgcatccacatgggcgtgaccgccgagaatgtcgccaaggaatacgacatctcgcgcgcgcagcaggacgaggccgcgctggaatcgcaccgccgcgcttcggcagcgatcaaggccggctacttcaaggaccagatcgtcccggtggtgagcaagggccgcaagggcgacgtgaccttcgacaccgacgagcacgtgcgccatgacgccaccatcgacgacatgaccaagctcaggccggtcttcgtcaaggaaaacggcacggtcacggccggcaatgcctcgggcctgaacgacgccgccgccgcggtggtgatgatggagcgcgccgaagccgagcgccgcggcctgaagccgctggcccgcctggtgtcgtacggccatgccggcgtggacccgaaggccatgggcatcggcccggtgccggcgacgaagatcgcgctggagcgcgccggcctgcaggtgtcggacctggacgtgatcgaagccaacgaagcctttgccgcacaggcgtgcgccgtgaccaaggcgctcggtctggacccggccaaggttaacccgaacggctcgggcatctcgctgggccacccgatcggcgccaccggtgccctgatcacggtgaaggcgctgcatgagctgaaccgcgtgcagggccgctacgcgctggtgacgatgtgcatcggcggcgggcagggcattgccgccatcttcgagcgtatctgaacggaaggaggcagatatgtctacaacacataacgtccctcagggcgatcttgttttacgtactttagccatgcccgccgataccaatgccaatggtgacatctttggtggttggttaatgtcacaaatggatattggcggcgctattctggcaaaagaaattgcccacggtcgcgtagtgactgtgcgggttgaaggaatgactttcttacggccggttgcggtcggcgatgtggtgtgctgctatgcacgctgtgtccagaaagggacgacatcggtcagcattaatattgaagtgtgggtgaaaaaagtagcgtctgaaccaatcgggcaacggtataaagcgacagaagcattatttaagtatgtcgcggttgatcctgaaggaaaacctcgcgccttacctgttgagtaactatcataaaaataagaagcctgcatttgcaggcttcttatttttat

SEQ ID NO: 57 - DNA, 24119 bp, artificial sequence
  plasmid SG898
agtgagcaataaaaataagaagcctgcatttgcaggcttcttatttttatagaccggggacttatcagccaacctgtaggccagcaaaaggccaggaaccgtaaaaaggccgcgttgctggcgtttttccataggctccgcccccctgacgagcatcacaaaaatcgacgctcaagtcagaggtggcgaaacccgacaggactataaagataccaggcgtttccccctggaagctccctcgtgcgctctcctgttccgaccctgccgcttaccggatacctgtccgcctttctcccttcgggaagcgtggcgctttctcatagctcacgctgtaggtatctcagttcggtgtaggtcgttcgctccaagctgggctgtgtgcacgaaccccccgttcagcccgaccgctgcgccttatccggtaactatcgtcttgagtccaacccggtaagacacgacttatcgccactggcagcagccactggtaacaggattagcagagcgaggtatgtaggcggtgctacagagttcttgaagtggtggcctaactacggctacactagaagaacagtatttggtatctgcgctctgctgaagccagttaccttcggaaaaagagttggtagctcttgatccggcaaacaaaccaccgctggtagcggtggtttttttgtttgcaagcagcagattacgcgcagaaaaaaaggatctcaagaagatcctttgatcttttctacggggtctgacgctcagtggaacgaaaactcacgttaagggattttggtcatgagattatcaaaaaggatcttcacctagatccttttaaattaaaaatgaagttttaaatcaatctaaagtatatatgagtaaacttggtctgacagactcttcctttttcaatattattgaagcatttatcagggttattgtctcatgagcggatacatatttgaatgtatttagaaaaataaacaaataggggttccgcgcacatttccccgaaaagtgccacctgacggtcctgcaggtaatacgactcactatagggataacttaaatttatattttttactttataatatataattgattatagaatccaaattagataggaggaccaggtaaatggagaataattttattgtcaacgaaaacgagaaaagggttttaaagcagatatttaacaactccaatatcagtagaactcaaatttccaagaatttagaactgaataaagcaacaatttcgaacattcttaacaatctaaagcataaaagtttggtaaatgaagttggtgaaggaaattctactaaaagtggtggaagaaaacctatacttctcgaaattaatcaaaagtatgggtattatataagcatggatttgacatatgattctgttgagttaatgtataactattttgatgctacaattctcaaacaagatagttatgaactgaatgataagaatgtaagtagcatattacagatactcaaatctaacataaatgttagcgaaaaatacgacacattatacggtttattagggataagtatatccatacatgggattgtagatgatgaacaaaacatcattaatctaccatttcacaagaatgaaaaaagaacgtttactgatgaacttaagtctttcactaatgtaccagtggttattgaaaatgaggcaaatttaagtgcattatacgagaaaagtttatacatcaattcgaatattaacaacttgatcacattgtctatacataaaggtataggagctggcatcataatcaataagaaactctatagaggtagtaatggagaagctggagaaataggaaagactcttgttttagagtctatcaataacaatgataacaagtactataaaatagaggatatttgtagtcaagacgctttgatacaaaagattaataacagattaggagttacacttacatttaccgaactaatacagtattataacgaaggaaatagtattgtagctcatgaaatcaaacagtttatcaacaaaatgactgtcttaatacacaatcttaatactcagtttaatccagatgcaatatacatcaattgtcccttgattaatgaacttcctaatattctaaacgaaatcaaagaacaattctcttgtttttcacaaggaagtcctatacaattgcatttaaccactaatgttaaacaagctacattattaggtggaacattagcaattatgcagaaaacccttaacataaacaatatccaaatgaatattaaatagttacagcagtctgagttataaaatagatatctcggaccgtctattcttccttatttgagtgggtaccaatgaaatctttcgagctaaatcgatttctggcccactcttttttattttttagtaagcgtttacaaaaaatgaacaatgtgctatattacctctaaagttagtttgtttattaaattaaccaactaaaatgtcgggatccttactgcaataggttgctactgttttatcatgaatcatcaacgaatgtattttgcatatttcagtatctttaataaactctttgcaatttttacaagttttcatatacgcccttcttttcataaattaatttatgaattctatgtattccaaggagcttttggatccaattaggaggaatctgcgatggaaaaaaaggaatttcgtgttttgataaaatactgttttctgaagggaaaaaatacggtggaagcaaaaacttggcttgataatgagtttccggactctgccccagggaaatcaacaataattgattggtatgcaaaattcaagcgtggtgaaatgagcacggaggacggtgaacgcagtggacgcccgaaagaggtggttaccgacgaaaacatcaaaaaaatccacaaaatgattttgaatgaccgtaaaatgaagttgatcgagatagcagaggccttaaagatatcaaaggaacgtgttggtcatatcattcatcaatatttggatatgcggaagctctgtgcaaaatgggtgccgcgcgagctcacatttgaccaaaaacaacaacgtgttgatgattctgagcggtgtttgcagctgttaactcgtaatacacccgagtttttccgtcgatatgtgacaatggatgaaacatggctccatcactacactcctgagtccaatcgacagtcggctgagtggacagcgaccggtgaaccgtctccgaagcgtggaaagactcaaaagtccgctggcaaagtaatggcctctgttttttgggatgcgcatggaataatttttatcgattatcttgagaagggaaaaaccatcaacagtgactattatatggcgttattggagcgtttgaaggtcgaaatcgcggcaaaacggccccacatgaagaagaaaaaagtgttgttccaccaagacaacgcaccgtgccacaagtcattgagaacgatggcaaaaattcatgaattgggcttcgaattgcttccccacccaccgtattctccagatctggcccccagcgactttttcttgttctcagacctcaaaaggatgctcgcagggaaaaaatttggctgcaatgaagaggtgatcgccgaaactgaggcctattttgaggcaaaaccgaaggagtactaccaaaatggtatcaaaaaattggaaggtcgttataatcgttgtatcgctcttgaagggaactatgttgaataagaattccttaattaaggagctcgataaaaataagaagcctgcatttgcaggcttcttatttttatggtcatagctgtttcctggcgcgccgccattatttttttgaacaattgacaattcatttcttattttttattaagtgatagtcaaaaggcataacagtgctgaatagaaagaaatttacagaaaagaaaattatagaatttagtatgattaattatactcatttatgaatgtttaattgaatacaaaaaaaaatacttgttatgtattcaattacgggttaaaatatagacaagttgaaaaatttaataaaaaaataagtcctcagctcttatatattaagctaccaacttagtatataagccaaaacttaaatgtgctaccaacacatcaagccgttagagaactctatctatagcaatatttcaaatgtaccgacatacaagagaaacattaactatatatattcaatttatgagattatcttaacagatataaatgtaaattgcaataagtaagatttagaagtttatagcctttgtgtattggaagcagtacgcaaaggcttttttatttgataaaaattagaagtatatttattttttcataattaatttatgaaaatgaaagggggtgagcaaagtgacagaggaaagcagtatcttatcaaataacaaggtattagcaatatcattattgactttagcagtaaacattatgacttttatagtgcttgtagctaagtagtacgaaagggggagctttaaaaagctccttggaatacatagaattcataaattaatttatgaaaagaagggcgtatatgaaaacttgtaaaaattgcaaagagtttattaaagatactgaaatatgcaaaatacattcgttgatgattcatgataaaacagtagcaacctattgcagtaaatacaatgagtcaagatgtttacataaagggaaagtccaatgtattaattgttcaaagatgaaccgatatggatggtgtgccataaaaatgagatgttttacagaggaagaacagaaaaaagaacgtacatgcattaaatattatgcaaggagctttaaaaaagctcatgtaaagaagagtaaaaagaaaaaataatttatttattaatttaatattgagagtgccgacacagtatgcactaaaaaatatatctgtggtgtagtgagccgatacaaaaggatagtcactcgcattttcataatacatcttatgttatgattatgtgtcggtgggacttcacgacgaaaacccacaataaaaaaagagttcggggtagggttaagcatagttgaggcaactaaacaatcaagctaggatatgcagtagcagaccgtaaggtcgttgtttaggtgtgttgtaatacatacgctattaagatgtaaaaatacggataccaatgaagggaaaagtataatttttggatgtagtttgtttgttcatctatgggcaaactacgtccaaagccgtttccaaatctgctaaaaagtatatcctttctaaaatcaaagtcaagtatgaaatcataaataaagtttaattttgaagttattatgatattatgtttttctattaaaataaattaagtatatagaatagtttaataatagtatatacttaatgtgataagtgtctgacagtgtcacagaaaggatgattgttatggattataagcggccggccagtgggcaagttgaaaaattcacaaaaatgtggtataatatctttgttcattagagcgataaacttgaatttgagagggaacttagatggtatttgaaaaaattgataaaaatagttggaacagaaaagagtattttgaccactactttgcaagtgtaccttgtacctacagcatgaccgttaaagtggatatcacacaaataaaggaaaagggaatgaaactatatcctgcaatgctttattatattgcaatgattgtaaaccgccattcagagtttaggacggcaatcaatcaagatggtgaattggggatatatgatgagatgataccaagctatacaatatttcacaatgatactgaaacattttccagcctttggactgagtgtaagtctgactttaaatcatttttagcagattatgaaagtgatacgcaacggtatggaaacaatcatagaatggaaggaaagccaaatgctccggaaaacatttttaatgtatctatgataccgtggtcaaccttcgatggctttaatctgaatttgcagaaaggatatgattatttgattcctatttttactatggggaaatattataaagaagataacaaaattatacttcctttggcaattcaagttcatcacgcagtatgtgacggatttcacatttgccgttttgtaaacgaattgcaggaattgataaatagttaacttcaggtttgtctgtaactaaaaacaagtatttaagcaaaaacatcgtagaaatacggtgttttttgttaccctaagtttactctatcattgatagagtgcgactctatcattgatagagtccacaggttggctgataagtccccggtctgtaccgttcgtataatgtatgctatacgaagttataggaggttataatgaacgagaaaaatataaaacacagtcaaaactttattacttcaaaacataatatagataaaataatgacaaatataagattaaatgaacatgataatatctttgaaatcggctcaggaaaagggcattttacccttgaattagtacagaggtgtaatttcgtaactgccattgaaatagaccataaattatgcaaaactacagaaaataaacttgttgatcacgataatttccaagttttaaacaaggatatattgcagtttaaatttcctaaaaaccaatcctataaaatatttggtaatataccttataacataagtacggatataatacgcaaaattgtttttgatagtatagctgatgagatttatttaatcgtggaatacgggtttgctaaaagattattaaatacaaaacgctcattggcattatttttaatggcagaagttgatatttctatattaagtatggttccaagagaatattttcatcctaaacctaaagtgaatagctcacttatcagattaaatagaaaaaaatcaagaatatcacacaaagataaacagaagtataattatttcgttatgaaatgggttaacaaagaatacaagaaaatatttacaaaaaatcaatttaacaattccttaaaacatgcaggaattgacgatttaaacaatattagctttgaacaattcttatctcttttcaatagctataaattatttaataagtaagttaagggatgcataaactgcatcccttaacttgtttttcgtgtacctattttttgtgaatcgattatgtcttttgcgcattcgtcgacaattgcatatattgataaaaataataatagtgggtataattaagttgttaggaggttagttagaatgagtagactcgataagtctaaagtgataaattccgcattagaactccttaatgaagttggaattgaaggtctaactaccaggaaattagctcagaaacttggagttgaacaaccaacattgtactggcatgtcaaaaacaaaagagcactcttagatgcattagcaatcgaaatgttagacagacatcatacacacttttgtccattagaaggtgaaagttggcaagactttttgaggaataacgcgaaaagtttcagatgtgctttactatcccatagagatggggctaaagttcacttaggaactagacctacagaaaagcagtatgagacacttgaaaatcagttggcatttctatgtcaacaaggattctcattagagaacgcattatatgctctttcagctgtaggtcatttcacgttaggttgtgttttggaagatcaagaacatcaagttgcaaaagaagagagagaaactcctactacagatagtatgccacctttattacgacaagctatagaactgtttgatcatcaaggagctgaacctgcgtttctctttggattggagttaataatttgcggactagagaaacagcttaagtgtgaaagtggatcttagttagcaccggtcagggtggtgaatgtgaaaccagtaacgttatacgatgtcgcagagtatgccggtgtctcttatcagaccgtttcccgcgtggtgaaccaggccagccacgtttctgcgaaaacgcgggaaaaagtggaagcggcgatggcggagctgaattacattcccaaccgcgtggcacaacaactggcgggcaaacagtcgttgctgattggcgttgccacctccagtctggccctgcacgcgccgtcgcaaattgtcgcggcgattaaatctcgcgccgatcaactgggtgccagcgtggtggtgtcgatggtagaacgaagcggcgtcgaagcctgtaaagcggcggtgcacaatcttctcgcgcaacgcgtcagtgggctgatcattaactatccgctggatgaccaggatgccattgctgtggaagctgcctgcactaatgttccggcgttatttcttgatgtctctgaccagacacccatcaacagtattattttctcccatgaagacggtacgcgactgggcgtggagcatctggtcgcattgggtcaccagcaaatcgcgctgttagcgggcccattaagttctgtctcggcgcgtctgcgtctggctggctggcataaatatctcactcgcaatcaaattcagccgatagcggaacgggaaggcgactggagtgccatgtccggttttcaacaaaccatgcaaatgctgaatgagggcatcgttcccactgcgatgctggttgccaacgatcagatggcgctgggcgcaatgcgcgccattaccgagtccgggctgcgcgttggtgcggacatctcggtagtgggatacgacgataccgaagacagctcatgttatatcccgccgttaaccaccatcaaacaggattttcgcctgctggggcaaaccagcgtggaccgcttgctgcaactctctcagggccaggcggtgaagggcaatcagctgttgcccgtctcactggtgaaaagaaaaaccaccctggcgcccaatacgcaaaccgcctctccccgcgcgttggccgattcattaatgcagctggcacgacaggtttcccgactggaaagcgggcagtgagcgcaacgcaattaatgtaagttagctcactcattaggcaccgggatctcgaccgatgcccttgagagccttcaacccagtcagctccttccggtgggcgcggggcatgactagcatgatcgtgctcctgtcgttgaggacccggctaggctggcggggttgccttactggttagcagaatgaatcaccgatacgcgataacttcgtataatgtatgctatacgaacggtagctcagctagcacccggaattgtgagcggataacaattccttggaattgtgagcggataacaattataattaagttgttaggaggttagaatgagtctgaatttccttgattttgaacagccgattgcagagctggaagcgaaaatcgattctctgactgcggttagccgtcaggatgagaaactggatattaacatcgatgaagaagtgcatcgtctgcgtgaaaaaagcgtagaactgacacgtaaaatcttcgccgatctcggtgcatggcagattgcgcaactggcacgccatccacagcgtccttataccctggattacgttcgcctggcatttgatgaatttgacgaactggctggcgaccgcgcgtatgcagacgataaagctatcgtcggtggtatcgcccgtctcgatggtcgtccggtgatgatcattggtcatcaaaaaggtcgtgaaaccaaagaaaaaattcgccgtaactttggtatgccagcgccagaaggttaccgcaaagcactgcgtctgatgcaaatggctgaacgctttaagatgccaatcatcacctttatcgacaccccgggggcttatccgggcgtgggcgcagaagagcgcggtcagtctgaagccattgcacgcaacctgcgtgaaatgtctcgccttagcgtaccgactatttgtaccgttatcggtgaaggtggttctggcggcgcgctggcgattggcgtgggcgataaagtgaatatgctgcaatacagcacctattccgttatctcgccggaaggttgtgcgtccattctgtggaagagcgctgataaagcgccgctggcggctgaagcgatgggtatcatcgctccgcgtctgaaagaactaaaactgatcgactccatcatcccagaaccgctgggtggtgctcaccgtaacccggaagcgatggcggcatcgttgaaagcgcaactgttggcggatctggccgatctcgacgtgttaagcactgaagatttaaaaaatcgtcgttatcagcgcctgatgagctacggttacgcgtaataaggaggaacccactcatggatattcgtaagattaaaaaactgatcgagctggttgaagaatcaggcatctccgaactggaaatttctgaaggcgaagagtcagtacgcattagccgtgcagctcctgccgcaagtttccctgtgatgcaacaagcttacgctgcaccaatgatgcagcagccagctcaatctaacgcagccgctccggcgaccgttccttccatggaagcgccagcagcagcggaaatcagtggtcacatcgtacgttccccgatggttggtactttctaccgcaccccaagcccggacgcaaaagcgttcatcgaagtgggtcagaaagtcaacgtgggcgataccctgtgcatcgttgaagccatgaaaatgatgaaccagatcgaagcggacaaatccggtaccgtgaaagcaattctggtcgaaagtggacaaccggtagaatttgacgagccgctggtcgtcatcgagtaacgaggcgaacatgctggataaaattgttattgccaaccgcggcgagattgcattgcgtattcttcgtgcctgtaaagaactgggcatcaagactgtcgctgtgcactccagcgcggatcgcgatctaaaacacgtattactggcagatgaaacggtctgtattggccctgctccgtcagtaaaaagttatctgaacatcccggcaatcatcagcgccgctgaaatcaccggcgcagtagcaatccatccgggttacggcttcctctccgagaacgccaactttgccgagcaggttgaacgctccggctttatcttcattggcccgaaagcagaaaccattcgcctgatgggcgacaaagtatccgcaatcgcggcgatgaaaaaagcgggcgtcccttgcgtaccgggttctgacggcccgctgggcgacgatatggataaaaaccgtgccattgctaaacgcattggttatccggtgattatcaaagcctccggcggcggcggcggtcgcggtatgcgcgtagtgcgcggcgacgctgaactggcacaatccatctccatgacccgtgcggaagcgaaagctgctttcagcaacgatatggtttacatggagaaatacctggaaaatcctcgccacgtcgagattcaggtactggctgacggtcagggcaacgctatctatctggcggaacgtgactgctccatgcaacgccgccaccagaaagtggtcgaagaagcgccagcaccgggcattaccccggaactgcgtcgctacatcggcgaacgttgcgctaaagcgtgtgttgatatcggctatcgcggtgcaggtactttcgagttcctgttcgaaaacggcgagttctatttcatcgaaatgaacacccgtattcaggtagaacacccggttacagaaatgatcaccggcgttgacctgatcaaagaacagctgcgtatcgctgccggtcaaccgctgtcgatcaagcaagaagaagttcacgttcgcggccatgcggtggaatgtcgtatcaacgccgaagatccgaacaccttcctgccaagtccgggcaaaatcacccgtttccacgcacctggcggttttggcgtacgttgggagtctcatatctacgcgggctacaccgtaccgccgtactatgactcaatgatcggtaagctgatttgctacggtgaaaaccgtgacgtggcgattgcccgcatgaagaatgcgctgcaggagctgatcatcgacggtatcaaaaccaacgttgatctgcagatccgcatcatgaatgacgagaacttccagcatggtggcactaacatccactatctggagaaaaaactcggtcttcaggaaaaataatataggaggatataacatgagctggattgaacgaattaaaagcaacattactcccacccgcaaggcgagcattcctgaaggggtgtggactaagtgtgatagctgcggtcaggttttataccgcgctgagctggaacgtaatcttgaggtctgtccgaagtgtgaccatcacatgcgtatgacagcgcgtaatcgcctgcatagcctgttagatgaaggaagccttgtggagctgggtagcgagcttgagccgaaagatgtgctgaagtttcgtgactccaagaagtataaagaccgtctggcatctgcgcagaaagaaaccggcgaaaaagatgcgctggtggtgatgaaaggcactctgtatggaatgccggttgtcgctgcggcattcgagttcgcctttatgggcggttcaatggggtctgttgtgggtgcacgtttcgtgcgtgccgttgagcaggcgctggaagataactgcccgctgatctgcttctccgcctctggtggcgcacgtatgcaggaagcactgatgtcgctgatgcagatggcgaaaacctctgcggcactggcaaaaatgcaggagcgcggcttgccgtacatctccgtgctgaccgacccgacgatgggcggtgtttctgcaagtttcgccatgctgggcgatctcaacatcgctgaaccgaaagcgttaatcggctttgccggtccgcgtgttatcgaacagaccgttcgcgaaaaactgccgcctggattccagcgcagtgaattcctgatcgagaaaggcgcgatcgacatgatcgtccgtcgtccggaaatgcgcctgaaactggcgagtattctggcgaagttgatgaatctgccagcgccgaatcctgaagcgccgcgtgaaggcgtagtggtacccccggtaccggatcaggaacctgaggcctgagactaggaggatcttaaaaaggagtgtatataaatgagtttaacacaaggcatgaaagcaaaacagttgttagcctactttcagggaaaggctgatcaagatgcaagagaagcaaaagcaagaggcgaacttgtttgttggtctgcttccgtagctccccctgaattctgcgtgacaatgggtatcgcaatgatttatcctgagacccacgcagcaggtattggcgcaagaaaaggcgcaatggacatgttggaagttgctgatagaaaaggctacaatgttgactgctgttcttacggcagagtaaacatgggttacatggaatgcctgaaggaagctgcaattacaggtgtaaaacctgaggttttggtcaactctcctgcagcagacgttcctctgcctgacttggtaatcacatgtaataacatttgtaatacattgttgaaatggtatgaaaaccttgcggcagaattagacattccttgcatcgttatcgacgttcctttcaaccacacaatgcctattcctgaatatgcaaaagcttacattgcagatcagtttagaaatgcaatttctcagctggaagtaatctgtggtagaccttttgactggaagaagtttaaagaagttaaagatcagacacagcgttctgtataccactggaacagaattgcagaaatggctaaatataaaccatcacctttgaatggcttcgacttgtttaattacatggcattgatcgttgcttgccgttctttggattatgctgaaattacattcaaagcatttgctgatgaattagaagaaaacttgaaggctggtatctatgcattcaagggcgctgaaaagactcgtttccaatgggaaggtattgctgtatggcctcacttgggtcacacattcaagtccatgaagaacctcaattctatcatgacaggtacagcttaccctgcactttgggatttgcactatgatgcaaacgatgaatctatgcactctatggcagaagcttatacaagaatttatattaacacatgcttacagaacaaagttgaagttttgttgggcatcatggaaaaaggccaggttgacggtacagtttatcacttgaacagaagctgtaagttgatgagcttcctgaacgttgaaacagctgaaattatcaaagaaaagaatggtttgccttatgtaagcatcgatggtgaccagacagatcctcgcgtattctctcccgcacagtttgatacacgtgttcaggcactggttgaaatgatggaagccaacatggctgcagcagaataaatcacaaggaggatcacatgagtagagtagaagctattttatcccaattaaaagacgttgccgcaaatcctaaaaaggcaatggatgattataaggcggaaacaggtaagggtgcagtaggtattatgcctatttactcccctgaagaaatggtacacgcagctggttatttgcctatgggtatctggggtgcacaaggtaaaacaatttccaaggctcgtacatatcttcctgcatttgcttgttcagttatgcagcaggttatggaactgcagtgtgaaggcgcttatgatgacctttctgctgtaattttctctgtaccttgtgatacattaaagtgcttaagccagaaatggaaaggcacatcccctgtaattgtatttacacatcctcagaacagaggcttggaagctgcaaatcagttcttagtaacagagtatgaattggtaaaggctcagcttgaatcagttttgggtgtaaaaatttcaaacgctgctttggagaattccattgcaatttacaatgaaaacagagcagttatgcgtgaatttgtaaaggttgcagctgattaccctcaggtaattgatgcagttagccgtcatgctgttttcaaagcaagacagttcatgttaaaagaaaaacacacagcacttgtaaaagagctcattgctgaaattaaggctacacctgttcagccttgggatggcaagaaagttgttgttacaggtatcttacttgagcccaacgaattgcttgatatcttcaatgaattcaaaattgctatcgttgatgacgatttggctcaggaatccagacagattcgtgttgacgttctggatggcgaaggtggccctctttatagaatggcaaaagcttggcagcaaatgtacggttgctctcttgcaactgatacaaagaaaggccgcggcagaatgctgatcaacaagacaattcagacaggtgcagatgctatcgttgttgcgatgatgaaattctgtgatcctgaagaatgggattaccctgtaatgtacagagaatttgaagaaaaaggcgttaagagtctgatgatcgaagttgatcaggaagtttcttccttcgaacagatcaagacaagactgcagtctttcgtagaaatgctgtaaagtataggaggactacatgagcggaacaggacgactggcaggaaagattgcgttaattaccggtggcgccggcaatatcggcagtgaattgacacgtcgctttctcgcagagggagcgacggtcattattagtggacggaatcgggcgaagttgaccgcactggccgaacggatgcaggcagaggcaggagtgccggcaaagcgcatcgatctcgaagtcatggatgggagtgatccggtcgcggtacgtgccggtatcgaagcgattgtggcccgtcacggccagatcgacattctggtcaacaatgcaggaagtgccggtgcccagcgtcgtctggccgagattccactcactgaagctgaattaggccctggcgccgaagagacgcttcatgccagcatcgccaatttacttggtatgggatggcatctgatgcgtattgcggcacctcatatgccggtaggaagtgcggtcatcaatgtctcgaccatcttttcacgggctgagtactacgggcggattccgtatgtcacccctaaagctgctcttaatgctctatctcaacttgctgcgcgtgagttaggtgcacgtggcatccgcgttaatacgatctttcccggcccgattgaaagtgatcgcatccgtacagtgttccagcgtatggatcagctcaaggggcggcccgaaggcgacacagcgcaccattttttgaacaccatgcgattgtgtcgtgccaacgaccagggcgcgcttgaacgtcggttcccctccgtcggtgatgtggcagacgccgctgtctttctggccagtgccgaatccgccgctctctccggtgagacgattgaggttacgcacggaatggagttgccggcctgcagtgagaccagcctgctggcccgtactgatctgcgcacgattgatgccagtggccgcacgacgctcatctgcgccggcgaccagattgaagaggtgatggcgctcaccggtatgttgcgtacctgtgggagtgaagtgatcatcggcttccgttcggctgcggcgctggcccagttcgagcaggcagtcaatgagagtcggcggctggccggcgcagactttacgcctcccattgccttgccactcgatccacgcgatccggcaacaattgacgctgtcttcgattgggccggcgagaataccggcgggattcatgcagcggtgattctgcctgctaccagtcacgaaccggcaccgtgcgtgattgaggttgatgatgagcgggtgctgaattttctggccgatgaaatcaccgggacaattgtgattgccagtcgcctggcccgttactggcagtcgcaacggcttacccccggcgcacgtgcgcgtgggccgcgtgtcatttttctctcgaacggtgccgatcaaaatgggaatgtttacggacgcattcaaagtgccgctatcggtcagctcattcgtgtgtggcgtcacgaggctgaacttgactatcagcgtgccagcgccgccggtgatcatgtgctgccgccggtatgggccaatcagattgtgcgcttcgctaaccgcagccttgaagggttagaatttgcctgtgcctggacagctcaattgctccatagtcaacgccatatcaatgagattaccctcaacatccctgccaacattagcgccaccaccggcgcacgcagtgcatcggtcggatgggcggaaagcctgatcgggttgcatttggggaaagttgccttgattaccggtggcagcgccggtattggtgggcagatcgggcgcctcctggctttgagtggcgcgcgcgtgatgctggcagcccgtgatcggcataagctcgaacagatgcaggcgatgatccaatctgagctggctgaggtggggtataccgatgtcgaagatcgcgtccacattgcaccgggctgcgatgtgagtagcgaagcgcagcttgcggatcttgttgaacgtaccctgtcagcttttggcaccgtcgattatctgatcaacaacgccgggatcgccggtgtcgaagagatggttatcgatatgccagttgagggatggcgccataccctcttcgccaatctgatcagcaactactcgttgatgcgcaaactggcgccgttgatgaaaaaacagggtagcggttacatccttaacgtctcatcatactttggcggtgaaaaagatgcggccattccctaccccaaccgtgccgattacgccgtctcgaaggctggtcagcgggcaatggccgaagtctttgcgcgcttccttggcccggagatacagatcaatgccattgcgccgggtccggtcgaaggtgatcgcttgcgcggtaccggtgaacgtcccggcctctttgcccgtcgggcgcggctgattttggagaacaagcggctgaatgagcttcacgctgctcttatcgcggctgcgcgcaccgatgagcgatctatgcacgaactggttgaactgctcttacccaatgatgtggccgcactagagcagaatcccgcagcacctaccgcgttgcgtgaactggcacgacgttttcgcagcgaaggcgatccggcggcatcatcaagcagtgcgctgctgaaccgttcaattgccgctaaattgctggctcgtttgcataatggtggctatgtgttgcctgccgacatctttgcaaacctgccaaacccgcccgatcccttcttcacccgagcccagattgatcgcgaggctcgcaaggttcgtgacggcatcatggggatgctctacctgcaacggatgccgactgagtttgatgtcgcaatggccaccgtctattaccttgccgaccgcaatgtcagtggtgagacattccacccatcaggtggtttgcgttacgaacgcacccctaccggtggcgaactcttcggcttgccctcaccggaacggctggcggagctggtcggaagcacggtctatctgataggtgaacatctgactgaacaccttaacctgcttgcccgtgcgtacctcgaacgttacggggcacgtcaggtagtgatgattgttgagacagaaaccggggcagagacaatgcgtcgcttgctccacgatcacgtcgaggctggtcggctgatgactattgtggccggtgatcagatcgaagccgctatcgaccaggctatcactcgctacggtcgcccagggccggtcgtctgtacccccttccggccactgccgacggtaccactggtcgggcgtaaagacagtgactggagcacagtgttgagtgaggctgaatttgccgagttgtgcgaacaccagctcacccaccatttccgggtagcgcgcaagattgccctgagtgatggtgccagtctcgcgctggtcactcccgaaactacggctacctcaactaccgagcaatttgctctggctaacttcatcaaaacgacccttcacgcttttacggctacgattggtgtcgagagcgaaagaactgctcagcgcattctgatcaatcaagtcgatctgacccggcgtgcgcgtgccgaagagccgcgtgatccgcacgagcgtcaacaagaactggaacgttttatcgaggcagtcttgctggtcactgcaccactcccgcctgaagccgatacccgttacgccgggcggattcatcgcggacgggcgattaccgtgtaaaatcataggaggatcaacatgtttatgcgatatattatggttgaggaacagaccctgaagaccgggtcacaggaactagaggagaaggcagactataacatgagatattacgctcacctcatgaagttgagtaaggaaaaacctgcagagttctggggatctctagcacaggacctgctagactggtatgagccttggaaggagaccatgagacaggaagacccgatgacaaggtggttcataggaggtaagataaatgcctcgtacaacgctgtcgacagacacctcaacggccccagaaagttcaaggctgcggtcatctgggaaagtgagttaggggaaaggaagatcgtgacgtatcaggacatgttctatgaggttaataggtgggccaatgcgctcagatccctaggagttggtaaaggggatagggtgaccatatacatgcccctgaccccagagggaatagctgcaatgctggcctcggccaggataggtgcaattcatagcgtaatatttgccggctttggttcgcaagccatagccgacagggttgaggacgccaaggcgaaggtagtgatcactgctgacgcctatcccagaaggggaaaggttgtggagttaaagaagactgtcgacgaggccttaaactcccttggagaaaggagcccagtacagcacgtgctcgtgtataggaggatgaaaacggatgtaaacatgaaggagggaagagacgttttcttcgacgaggtcggcaagtacaggtacgtggagcctgaaaggatggactccaatgatccactcttcattctctacacctctgggaccaccggtaaacctaagggaattatgcactctaccggtggttatctgaccgggacagccgttatgctactgtggagctacggccttagccaggagaacgacgttctcttcaacacctcagatattggttggatagttggccactcctacattacctattccccccttatcatggggagaacggttgtcatttacgagagcgccccagactatccctacccagacaagtgggctgagattattgagagatacagggcaaccactttcggcacctcagctacagccttgcgttacttcatgaagtatggggacgaatacgtgaagaaccacgatctctcgtccatcaggataattgtgacgaacggggaagtgcttaactactctccgtggaagtgggggctagaagtgttaggtggaggaaaggtattcatgtcccatcagtggtggcaaactgagacaggcgcaccgaacctgggctaccttccgggtataatttacatgccaatgaagtcgggtccagcctcaggcttccctctacccggtaacttcgtggaggttctggacgagaacggaaatccctctgcccctagagtgagaggataccttgtaatgaggccacccttcccgcctaacatgatgatggggatgtggaacgataatggggagaggttgaagaagacgtactttagcaagttcggttccctgtattatccaggagacttcgccatggtggatgaggatggatacatctgggtgttgggtagggcagacgagactctaaaaattgcagcccacagaattggagctggggaagtggaatcagcaatcacttctcacccatcggttgccgaggcagcagtcataggcgtgccagactcagtgaaaggagaagaggttcacgcgttcgttgtgctaaagcaaggttacgctccttcctctgaactggctaaggacatacagtcacacgttaggaaggtcatggggcccattgttagtccgcagattcatttcgtggataagttgcctaagacaaggtctgggaaggtcatgagaagggtgataaaggcagtgatgatgggttcgagtgctggcgacttaaccaccatagaggacgaagcatcaatggacgaaataaagaaggctgtcgaggaactaaagaaggagttaaagacctcctagacatcgaaggaggactactatggaatttgaaacaatagaaactaaaaaagaaggaaacttgttctggattacgttaaatagacccgataaactaaacgcactaaacgctaaattacttgaggagttagatagggcagtctctcaggcagagtctgacccagagattagggttatcatcattacagggaaaggaaaggccttctgcgcaggggctgacataacccagtttaaccagttaaccccagcagaagcctggaaattctctaagaaaggaagagagatcatggacaagatagaggcactgagcaaacccaccattgccatgatcaatggatatgcccttgggggtggactagagctagccttagcctgtgatataaggatcgcagcggaggaggcccaactaggccttccagagataaacctagggatatatccggggtatggggggactcagaggttaaccagagttataggaaagggaagagccctggagatgatgatgacgggcgatcgtattcctggtaaggatgctgagaaatatggtctcgtgaatagggttgtccccctagctaacttggagcaagagacaaggaagctggcagaaaagatagccaagaagtctcctatctctctcgccttaatcaaggaagttgtaaacaggggactagactctcccctactgtcaggtctagcgttggaaagcgtaggatggggagtcgtgttttctacggaggacaagaaggagggggtaagtgccttcctggagaagagagagcctacgtttaagggaaaatagaactagaggaggactactatggaaaactttatcggaagccacatgatttatacgtatgaaaacggatgggaatacgagatttatattaaaaacgaccatacaattgattatagaattcatagcggaatggttgccggacgctgggttcgagatcaggaagtgaatattgtcaaactgacagaaggcgtatataaagtgtcttggacagagccgactggcacggatgtttcattaaactttatgccaaatgaaaaacgcatgcatggcattattttcttcccgaaatgggtgcatgaacatcctgaaattacggtttgctaccaaaatgaccacattgatttgatgaaagaatcccgcgaaaaatatgaaacgtatccaaaatacgttgtacctgaatttgcggaaattacatttctgaaaaatgaaggagtcgacaacgaagaagtgatttcgaaggctccttatgagggaatgacagacgatattcgcgcgggaagattataacttacaggaggatcacaagatgaaaaattgtgtcatcgtcagtgcggtacgtactgctatcggtagttttaacggttcactcgcttccaccagcgccatcgacctgggggcgacagtaattaaagccgccattgaacgtgcaaaaatcgattcacaacacgttgatgaagtgattatgggtaacgtgttacaagccgggctggggcaaaatccggcgcgtcaggcactgttaaaaagcgggctggcagaaacggtgtgcggattcacggtcaataaagtatgtggttcgggtcttaaaagtgtggcgcttgccgcccaggccattcaggcaggtcaggcgcagagcattgtggcggggggtatggaaaatatgagtttagccccctacttactcgatgcaaaagcacgctctggttatcgtcttggagacggacaggtttatgacgtaatcctgcgcgatggcctgatgtgcgccacccatggttatcatatggggattaccgccgaaaacgtggctaaagagtacggaattacccgtgaaatgcaggatgaactggcgctacattcacagcgtaaagcggcagccgcaattgagtccggtgcttttacagccgaaatcgtcccggtaaatgttgtcactcgaaagaaaaccttcgtcttcagtcaagacgaattcccgaaagcgaattcaacggctgaagcgttaggtgcattgcgcccggccttcgataaagcaggaacagtcaccgctgggaacgcgtctggtattaacgacggtgctgccgctctggtgattatggaagaatctgcggcgctggcagcaggccttacccccctggctcgcattaaaagttatgccagcggtggcgtgccccccgcattgatgggtatggggccagtacctgccacgcaaaaagcgttacaactggcggggctgcaactggcggatattgatctcattgaggctaatgaagcatttgctgcacagttccttgccgttgggaaaaacctgggctttgattctgagaaagtgaatgtcaacggcggggccatcgcgctcgggcatcctatcggtgccagtggtgctcgtattctggtcacactattacatgccatgcaggcacgcgataaaacgctggggctggcaacactgtgcattggcggcggtcagggaattgcgatggtgattgaacggttgaattaaacggaaggaggcagatatgatatggaaacggaaaatcaccctggaagcactgaatgctatgggtgaaggaaacatggtggggttcctggatattcgctttgaacatattggtgatgacacccttgaagcgacaatgccagtagactcgcggacaaagcagcctttcgggttgctgcatggaggagcatccgtggtactggccgaaagtatcggttccgttgccggttatttatgtaccgaaggtgagcaaaaagtggttggtctggaaatcaatgctaaccacgtccgctcggcacgagaagggcgggtgcgcggcgtatgcaaaccgttgcatctcggttcgcgtcaccaggtctggcagattgaaatcttcgatgagaaagggcgtttgtgctgttcgtcacgattgacgaccgccattttgtgactatcataaaaataagaagcctgcatttgcaggcttcttatttttat

SEQ ID NO: 58 - DNA, 21 bp, artificial sequence
  Primer
gcacttcctcttgttggaaat

SEQ ID NO: 59 - DNA, 21 bp, artificial sequence
  primer
acttgtgcaagtccacttaaa

SEQ ID NO: 60 - DNA, 20 bp, artificial sequence
  primer
ctatgtggcgcggtattatc

SEQ ID NO: 61 - DNA, 22 bp, artificial sequence
  primer
gcatttaagcgtcagagcatgg

SEQ ID NO: 62 - DNA, 23 bp, artificial sequence
  primer
tttaatcgtggaatacgggtttg

SEQ ID NO: 63 - DNA, 25 bp, artificial sequence
  primer
gtgagctattcactttaggtttagg

SEQ ID NO: 64 - DNA, 20 bp, artificial sequence
  primer
caaaaggccaggaaccgtaa

SEQ ID NO: 65 - DNA, 20 bp, artificial sequence
  primer
gcgtcagaccccgtagaaaa

SEQ ID NO: 66 - DNA, 21 bp, artificial sequence
  primer
attgtaaaccgccattcagag

SEQ ID NO: 67 - DNA, 21 bp, artificial sequence
  primer
ataccgttgcgtatcactttc

SEQ ID NO: 68 - DNA, 569 bp, artificial sequence
  Genome walking result
gaagagattttgaagatacactaagtcttgtaaaagaggtagagtacgattcagcatttacatttttatattctataagagagggtactcctgctgctaaatacgaaaatcaaattccagatgaggttaagcacaaaagatttaacaaacttcttgaggctgttaacctaataagcgaaaaaaagaacaaagaatatgaaggaaaaattgtagagattcttgttgaaggaaaaagcaagaatgatggtagtaaattgatgggaagaacaaggacaggaaagcttgttaattttgaagggctggagagttctataggaaaacttataaatgtaaaaataacaaaggcccaagctttttctttagttggcgaagaagtttaaatttactataagattgagggatgattaaagatgagcatatctcctatgatgcaacagtatttatctattaaggaaaatcataaagattgtattttgttctttagggtaggcgatttttatgagatgttttttgaggatgcagaagtcgcatctagagaactggaattagttcttacaggtaaggagtgt

SEQ ID NO: 69 - DNA, 1005 bp, artificial sequence
  Genome walking result
ttttaagattaaatgttataatttaattatataatttcattacgaaaggcggcaccactatgagcactttcatgtttaaaactaaaacaaacgaagtaacacctattagcaatatattcatagaaaactatatgacaaaagcacgaggtgaatacgtaaaggtatatctgctaggtttaaaatattgtacctcaggtgaacctggagtaaattcttctatgatggcttcaaaacttcacctcttggaaacagatataataaatgcctggaactactggaatgacgaaaacgtaataaaacttatccctatagataacaaaggaaatttcaatattcaatttcttgacttatcagaagaatctcctgaggatgaaaaagtggatttgctaagtgaattaaacaatacctccataaagggaatgcttcaagatatagaaaaattgcttggaagaaccttatctccaaaagagatgtctacatatataggctggcagaaggaatttagcttttctccagaactcatacttctattaatacaatatgctgtatcaaaaggcaaaacaaattatagatacattgaaaaaatagctctttcatggcatgactcaaaaataaaatctatagaagacgctcaaacctatataacaaaacatgaggacaaatggataaaaatacgcaaggttctagactacttaggaataaaagatgccgaaatcatgaaacctcaagaacagatgcttacaaaatggttagaatcttttagttttcctctcgatgttatatttagagcttgtgacatatgttttgaaagaataaacaaggctgattttaaatatatagatgccatattaaccaactggttcaaagcaggaattaaaacattggtagatgtagatacaaggatttaaaaaatctacatttaataaaaaacagcaaatactaacttaaagcaagatatttataattatgacaagaaaatacgattatgacgatttagaaaaaaat

SEQ ID NO: 70 - DNA, 569 bp, artificial sequence; identical to SEQ ID NO: 68
  Genome walking result

SEQ ID NO: 71 - DNA, 163 bp, artificial sequence
  Genome walking result
cactaagtcttgtaaaagaggtagagtacgattccgcatttacattttttttttctatatgagagggtactcctgctgctaaatacgaaaatcaaattccagatgaggttgagcaccaaagattttacaaacttcttgaggctgttaacctaataagcgaaaa

SEQ ID NO: 72 - DNA, 561 bp, artificial sequence
  Genome walking result
tttgaagatacactaagtcttgtaaaagaggtagagtacgattcagcatttacatttttatattctataagagagggtactcctgctgctaaatacgaaaatcaaattccagatgaggttaagcacaaaagatttaacaaacttcttgaggctgttaacctaataagcgaaaaaaagaacaaagaatatgaaggaaaaattgtagagattcttgttgaaggaaaaagcaagaatgatggtagtaaattgatgggaagaacaaggacaggaaagcttgttaattttgaagggctggagagttctataggaaaacttataaatgtaaaaataacaaaggcccaagctttttctttagttggcgaagaagtttaaatttactataagattgagggatgattaaagatgagcatatctcctatgatgcaacagtatttatctattaaggaaaatcataaagattgtattttgttctttagggtaggcgatttttatgagatgttttttgaggatgcagaagtcgcatctagagaactggaattagttcttacaggtaaggagtgt

SEQ ID NO: 73 - DNA, 573 bp, artificial sequence
  Genome walking result
gaagagattttgaagatacactaagtcttgtaaaagaggtagagtacgattcagcatttacatttttatattctataagagagggtactcctgctgctaaatacgaaaatcaaattccagatgaggttaagcacaaaagatttaacaaacttcttgaggctgttaacctaataagcgaaaaaaagaacaaagaatatgaaggaaaaattgtagagattcttgttgaaggaaaaagcaagaatgatggtagtaaattgatgggaagaacaaggacaggaaagcttgttaattttgaagggctggagagttctataggaaaacttataaatgtaaaaataacaaaggcccaagctttttctttagttggcgaagaagtttaaatttactataagattgagggatgattaaagatgagcatatctcctatgatgcaacagtatttatctattaaggaaaatcataaagattgtattttgttctttagggtaggcgatttttatgagatgttttttgaggatgcagaagtcgcatctagagaactggaattagttcttacaggtaaggagtgtggat

SEQ ID NO: 74 - DNA, 572 bp, artificial sequence
  Genome walking result
gaagagattttgaagatacactaagtcttgtaaaagaggtagagtacgattcagcatttacatttttatattctataagagagggtactcctgctgctaaatacgaaaatcaaattccagatgaggttaagcacaaaagatttaacaaacttcttgaggctgttaacctaataagcgaaaaaaagaacaaagaatatgaaggaaaaattgtagagattcttgttgaaggaaaaagcaagaatgatggtagtaaattgatgggaagaacaaggacaggaaagcttgttaattttgaagggctggagagttctataggaaaacttataaatgtaaaaataacaaaggcccaagctttttctttagttggcgaagaagtttaaatttactataagattgagggatgattaaagatgagcatatctcctatgatgcaacagtatttatctattaaggaaaatcataaagattgtattttgttctttagggtaggcgatttttatgagatgttttttgaggatgcagaagtcgcatctagagaactggaattagttcttacaggtaaggagtgtgga

SEQ ID NO: 75 - DNA, 806 bp, artificial sequence
  Genome walking result
tttgttattcttacattacttctttctacgcctatagagttaaggtacttttcaaagtttttgcccgctacaccaacaaagggttttccgctttcaacctcggatttaccaggggcttctccaacaaacattatgtcacaaggtataggaccatctcctgttataaagccaccagtagcctcttctttataattatttgctatagtttctattttgttttttagaaattgtaaattattcatataaggtgctcctaactaaagttaaattttaatgttgcataaattaagattcttatatattgtaccaaataatagagtgaaaaataacgtataaatctaaaattgattaggaaggtgaagtaaaatgaaaaaaatggtattgatatcattagcagcagcatcattaataacactctcagcgtgtacagctaagagtaacaattcaagcacgagtagtagtaattcagcttcaaataagactaaagcaagtagtaaaaatacatcttcatctagtggtaatagtaaactaaaatctgaagggacaagtacaaatacaaatacaacttcaaacggtgattatgtcataagtgatgtaagtagttggaatcatcctgttaagaatatttttggaagagaagctattaaaataaataaagttgttttacagaataacaagacctatcctgtattctatgtaactttaagtaaagaattgaatgcagaaaacaaggcttactatacaaaacttatgaaggaaattgccttggctaatggatattgggattatgaagtaatagatagtag

SEQ ID NO: 76 - DNA, 574 bp, artificial sequence
  Genome walking result
gaagaagattttgaagatacactaagtcttgtaaaagaggtagagtacgattcagcatttacatttttatattctataagagagggtactcctgctgctaaatacgaaaatcaaattccagatgaggttaagcacaaaagatttaacaaacttcttgaggctgttaacctaataagcgaaaaaaagaacaaagaatatgaaggaaaaattgtagagattcttgttgaaggaaaaagcaagaatgatggtagtaaattgatgggaagaacaaggacaggaaagcttgttaattttgaagggctggagagttctataggaaaacttataaatgtaaaaataacaaaggcccaagctttttctttagttggcgaagaagtttaaatttactataagattgagggatgattaaagatgagcatatctcctatgatgcaacagtatttatctattaaggaaaatcataaagattgtattttgttctttagggtaggcgatttttatgagatgttttttgaggatgcagaagtcgcatctagagaactggaattagttcttacaggtaaggagtgtggaa

SEQ ID NO: 77 - DNA, 597 bp, artificial sequence
  Genome walking result
attttaagattaaatgttataatttaattatataatttcattacgaaaggcggcaccactatgagcactttcatgtttaaaactaaaacaaacgaagtaacacctattagcaatatattcatagaaaactatatgacaaaagcacgaggtgaatacgtaaaggtatatctgctaggtttaaaatattgtacctcaggtgaacctggagtaaattcttctatgatggcttcaaaacttcacctcttggaaacagatataataaatgcctggaactactggaatgacgaaaacgtaataaaacttatccctatagataacaaaggaaatttcaatattcaatttcttgacttatcagaagaatctcctgaggatgaaaaagtggatttgctaagtgaattaaacaatacctccataaagggaatgcttcaagatatagaaaaattgcttggaagaaccttatctccaaaagagatgtctacatatataggctggcagaaggaatttagcttttctccagaactcatacttctattaatacaatatgctgtatcaaagggcaaaacaaattatagatacattgaaaaaatagctctttca

SEQ ID NO: 78 - DNA, 569 bp, artificial sequence; identical to SEQ ID NO: 68
  Genome walking result

SEQ ID NO: 79 - DNA, 491 bp, artificial sequence
  Genome walking result
gaagaagattttgaagatacactaagtcttgtaaaagaggtagagtacgattcagcatttacatttttatattctataagagagggtactcctgctgctaaatacgaaaatcaaattccagatgaggttaagcacaaaagatttaacaaacttcttgaggctgttaacctaataagcgaaaaaaagaacaaagaatatgaaggaaaaattgtagagattcttgttgaaggaaaaagcaagaatgatggtagtaaattgatgggaagaacaaggacaggaaagcttgttaattttgaagggctggagagttctataggaaaacttataaatgtaaaaataacaaaggcccaagctttttctttagttggcgaagaagtttaaatttactataagattgagggatgattaaagatgagcatatctcctatgatgcaacagtatttatctattaaggaaaatcataaagattgtattttgttctttagggtagg

SEQ ID NO: 80 - DNA, 471 bp, artificial sequence
  Genome walking result
ggagaacagaagaagattttgaagatacactaagtcttgtaaaagaggtagagtacgattcagcatttacatttttatattctataagagagggtactcctgctgctaaatacgaaaatcaaattccagatgaggttaagcacaaaagatttaacaaacttcttgaggctgttaacctaataagcgaaaaaaagaacaaagaatatgaaggaaaaattgtagagattcttgttgaaggaaaaagcaagaatgatggtagtaaattgatgggaagaacaaggacaggaaagcttgttaattttgaagggctggagagttctataggaaaacttataaatgtaaaaataacaaaggcccaagctttttctttagttggcgaagaagtttaaatttactataagattgagggatgattaaagatgagcatatctcctatgatgcaacagtatttatctattaaggaaaatcata

SEQ ID NO: 81 - DNA, 239 bp, artificial sequence
  Genome walking result
gaagattttgaagatacactaagtcttgtaaaagaggtagagtacgatcagcatttacatttttatattctataagagagggtactcctgccgctaaatacgaaaataaaattccagatgaggttaagcacaaaagatttaacaaacttcttgaggctgttaacctaataagcgaaaaaaagaacaaagaatatgaaggaaaaattgtagagattcttgttgtgtggaattgtgagcga

SEQ ID NO: 82 - DNA, 311 bp, artificial sequence
  Genome walking result
gaagaagattttgaagatacactaagtcttgtaaaagaggtagagtacgattcagcatttacatttttatattctataagagagggtactcctgctgctaaatacgaaaatcaaattccagatgaggttaagcacaaaagatttaacaaacttcttgaggctgttaacctaataagcgaaaaaaagaacaaagaatatgaaggaaaaattgtagagattcttgttgaaggaaaaagcaagaatgatggtagtaaattgatgggaagaacaaggacaggaaagcttgttaattttgaagggctggagagttc

SEQ ID NO: 83 - DNA, 296 bp, artificial sequence
  Genome walking result
gaagaagattttgaagatacactaagtcttgtaaaagaggtagagtacgattcagcatttacatttttatattctataagagagggtactcctgctgctaaatacgaaaatcaaattccagatgaggttaagcacaaaagatttaacaaacttcttgaggctgttaacctaataagcgaaaaaaagaacaaagaatatgaaggaaaaattgtagagattcttgttgaaggaaaaagcaagaatgatggtagtaaattgatgggaagaacaaggacaggaaagcttgttaattttga

SEQ ID NO: 84 - DNA, 147 bp, artificial sequence
  Genome walking result
acaacctattacagcaaagttaatggcagatttaatacatacagcaggtgcagatagggtactcactatggatcttcatgcaccacaaattcaaggattttttgatataccagtggatcatttagaaggagtaccgattttagctaa

SEQ ID NO: 85 - DNA, 446 bp, artificial sequence
  Genome walking result
tggcgttcagttggagattcaagagtaggaaagttcagcaatggagagacagcggttgatatcaatgagacagttagaggtacagatttatttttaattcaaactttatgtgaacctgttaatgatagtataatggaacttttaattatgttagatgcttttaaaagagcttctgcaggaagaataacagctgtaattcctaattatgcttatgcaaggcaggatagaaaagcaaaggcaagacaacctattacagcaaagttaatggcagatttaatacatacagcaggtgcagatagggtactcactatggatcttcatgcaccacaaattcaaggattttttgatataccagtggatcatttagaaggagtaccgattttagctaagtactttataaatcaaaattcgaatacagatgatttaatagtggtttcaccggatat

SEQ ID NO: 86 - DNA, 312 bp, artificial sequence
  Genome walking result
gtaataaagttttgactgtgttttatatttttctcgttcattataacctcctataacttcgtatagcatacattatacgaacggtacagaccggggacttatcagccaacctgttatatagtcttttgaattctacatatccgttttttctgagcttacaagctggacactctccacagccgttgcccttaattccattataacaagttaaagtttcattttttactatatctaaaacgcctaaatcatcggcaagtttccaggtttcagctttgtctatccacataagaggtgtaatttcgtaactgccaa

SEQ ID NO: 87 - DNA, 663 bp, artificial sequence
  Genome walking result
atcttatatttgtcattattttatctatattatgttttgaagtaataaagttttgactgtgttttatatttttctcgttcattataacctcctataacttcgtatagcatacattatacgaacggtacagaccggggacttatcagccaacctgttaagagcatcggatggttttgctatccttttatggcttatttcagaaatatgcaccaaaccatcaactcctggctcaagttctacaaatgcaccaaaatcagcaaatctaactacttttccaagcactacagaaccaacgggatatttctcctcaacattgttccaaggattctcagttaatttctttacacttagagataattttttgttttctttatctacacttaaaacatatactttaatcttatctcctatcttaagaacatcagcaggcttttcaacccttccccaagatatttcggatacatgaagaagtccatcaacaccttcaatttctacaaaagctccaaaatcagttaatcttttaacttctccctcaacaacttgaccttcctctaatttgttccaaacagtctcttctactttttctttttccttacttaatagtgctcttctagaagctactatctttgtttgtcttttctgaggtgtaatttctataactgc

SEQ ID NO: 88 - DNA, 216 bp, artificial sequence
  Genome walking result
tttgaagtaataaagttttgactgtgttttatatttttctcgttcattataacctcctataacttcgtatagcatacattatacgaacggtacagaccggggacttatcagccaacctgttatacaggcagattggtaagtgccactcatctttgaagacatatttatgcatataattttgtaaccttccttaagatactttgcaaagcaatcatt

SEQ ID NO: 89 - DNA, 414 bp, artificial sequence
  Genome walking result
tcttatatttgtcattattttatctatattatgttttgaagtaataaagttttgactgtgttttatatttttctcgttcattataacctcctataacttcgtatagcatacattatacgaacggtacagaccggggacttatcagccaacctgttatacactattctattattcttctttgttttcgcaggaagaattttgtgtattattgtatgtatttttgaggatacagttgcactgctgctgatatttccttcaatagtaaattcaatcttcttttcagccttatttccatattgatctttaacagaaattactaattcatgctttccagaagaggatatctcatctcctatgttgtaaggatttccgtctaaagttatctttgtataggaatctacaacatcttttgaa

SEQ ID NO: 90 - DNA, 469 bp, artificial sequence
  Genome walking result
ctcgttcattataacctcctataacttcgtatagcatacattatacgaacggtacagaccggggacttatcagccaacctgtggaattgttatccgctcacaattccgtcactcgtttaaacttagggtaacaaaaaacaccgtatttctacgatgtttttgcttaaatacttgtttttagttacagacaaacctgaagttaactatttatcaattcctgcaattcgtttacaaaacggcaaatgtgaaatccgtcacatactgcgtgatgaacttgaattgcactatatatgcctttacgaagttaccagacgtttgtttacggtataacttgtctacctctatgacttctccactttcttcgtctatgagcctctgagagcctttatagactgttccatatctttctttcatctttttctcactccttattttaaactattctaactatatcataactgttctaaaa

SEQ ID NO: 91 - DNA, 379 bp, artificial sequence
  Genome walking result
ttttgaagtaataaagttttgactgtgttttatatttttctcgttcattataacctcctataacttcgtatagcatacattatacgaacggtacagaccggggacttatcagccaacctgttagtacacctccaactataaagttagctaattctcctgtacctgcagtttgtgttcttaaaagatgtaaagcatttttcacaaattctattataattcctgctacaggtcccatagcaaaggctcctaaaagtgctggaagatcacttatatcgatttttaagaaacctggaaaaatcggaagtggaacctcgataaacataagtataaatcctattactgataaaagtgaaattttgattaaagtactgagttttga

SEQ ID NO: 92 - DNA, 37 bp, artificial sequence
  Primer
ctgtctcttatacacatctgctgataagtccccggtc

SEQ ID NO: 93 - DNA, 37 bp, artificial sequence; identical to SEQ ID NO: 92
  Primer

SEQ ID NO: 94 - DNA, 19 bp, artificial sequence
  Primer
gggttgccttactggttag

SEQ ID NO: 95 - DNA, 20 bp, artificial sequence
  Primer
gcagtatcggttcggtaatc

1. A recombinant microorganism comprising a heterologous nucleic acid sequence encoding one or more enzymes that allow the conversion of acetyl-CoA to one or more alkenes with a main chain of 2 to 5 carbon atoms, wherein the heterologous nucleic acid sequence comprises:
(a) one or more coding sequences encoding one or more enzymes that catalyse the conversion of acetyl-CoA to crotonyl-CoA, and that further catalyse the conversion of crotonyl-CoA to an alkene; or
(b) one or more coding sequences encoding one or more enzymes that catalyse the conversion of acetyl-CoA to 3-methylcrotonyl-CoA, and that further catalyse the conversion of 3-methylcrotonyl-CoA to an alkene; or
(c) one or more coding sequences encoding one or more enzymes that catalyse the conversion of acetyl-CoA to propionyl-CoA, and that further catalyse the conversion of propionyl-CoA to an alkene; or
(d) one or more coding sequences encoding one or more enzymes that catalyse the conversion of acetyl-CoA to acryloyl-CoA, and that further catalyse the conversion of acryloyl-CoA to an alkene;
wherein each coding sequence is operationally linked to a transcriptional promoter.

2. The recombinant microorganism of claim 1, further comprising endogenous enzymes that convert one or both of carbon monoxide and carbon dioxide to acetyl-CoA.

3. The recombinant microorganism of claim 1 or 2, wherein
(i) the one or more enzymes that catalyse the conversion of acetyl-CoA to crotonyl-CoA comprise:
acetyl-CoA carboxylase (EC 6.4.1.2); acetoacetyl-CoA synthase (EC 2.3.1.194); acetoacetyl-CoA reductase (EC 1.1.1.36); and enoyl-CoA hydratase 2 (EC 4.2.1.119); or
acetyl-CoA C-acetyltransferase (EC 2.3.1.9); 3-hydroxybutyryl-CoA dehydrogenase (EC 1.1.1.157); and 3-hydroxybutyryl-CoA dehydratase; or
4-aminobutyrate aminotransferase (EC 2.6.1.19); glutamate dehydrogenase (EC 1.4.1.2); 2-hydroxyglutarate dehydrogenase (EC 1.1.99.2); glutaconate CoA-transferase (EC 2.8.3.12); 2-hydroxyglutaryl-CoA dehydratase (EC 4.2.1.-); and glutaconyl-CoA decarboxylase (EC 4.1.1.70); or
4-aminobutyrate aminotransferase (EC 2.6.1.19); 4-hydroxybutyrate dehydrogenase (EC 1.1.1.61); 4-hydroxybutyrate CoA-transferase (EC 2.8.3.-); vinylacetyl-CoA-Delta-isomerase (EC 4.2.1.120); and 4-hydroxybutyryl-CoA dehydratase (EC 5.3.3.3);
(ii) the one or more enzymes that catalyse the conversion of acetyl-CoA to 3-methylcrotonyl-CoA comprise (a) one or both of (I) acetyl-CoA C-acetyltransferase (EC 2.3.1.9) and (II) a combination of acetyl-CoA carboxylase (EC 6.4.1.2) and acetoacetyl-CoA synthase (EC 2.3.1.194); (b) 3-hydroxy-3-methylglutaryl-CoA synthase (EC 2.3.3.10); (c) 3-methylglutaconyl-CoA hydratase (EC 4.2.1.18) and (d) 3-methylcrotonyl-CoA carboxylase (EC 6.4.1.4);
(iii) the one or more enzymes that catalyse the conversion of acetyl-CoA to propionyl-CoA comprise:
acetyl-CoA carboxylase (EC 6.4.1.2); malonyl CoA reductase (EC 1.2.1.75); malonyl CoA reductase (EC 1.1.1.298); propionyl-CoA synthase (EC 6.2.1.36); propionyl-CoA synthase/acryloyl-CoA synthase (EC 4.2.1.116); and propionyl-CoA synthase (EC 1.3.1.84); or
acetyl-CoA carboxylase (EC 6.4.1.2); methylmalonyl-CoA mutase (EC 5.4.99.2) and methylmalonyl-CoA decarboxylase (EC 4.1.1.41); or
2-oxoglutarate/butyrate ferredoxin oxidoreductase (EC 1.2.7.3) and/or pyruvate/2-oxobutyrate ferredoxin oxidoreductase (EC 1.2.7.1); or
lactate CoA-transferase (EC 2.8.3.-); lactoyl-CoA dehydratase (EC 4.2.1.54); and propionyl-CoA synthase (EC 1.3.1.84); and
(iv) the one or more enzymes that catalyse the conversion of acetyl-CoA to acryloyl-CoA comprise:
acetyl-CoA carboxylase (EC 6.4.1.2); malonyl CoA reductase (EC 1.2.1.75); malonyl CoA reductase (EC 1.1.1.298); propionyl-CoA synthase (EC 6.2.1.36); and propionyl-CoA synthase/acryloyl-CoA synthase (EC 4.2.1.116); or
lactate CoA-transferase (EC 2.8.3.-); and lactoyl-CoA dehydratase (EC 4.2.1.54).

4. The recombinant microorganism of claim 1, wherein
(i) the one or more enzymes that catalyse the conversion of crotonyl-CoA to an alkene comprise:
(a) acyl-CoA thioesterase (EC 3.1.2.-) and (b) phenyl acrylic acid decarboxylase (EC 4.1.1.-); or
(c) phosphate butyryltransferase (EC 2.3.1.19); (d) butyrate kinase (EC 2.7.2.7), and (e) phenyl acrylic acid decarboxylase (EC 4.1.1.-); or
(f) trans-2-enoyl-CoA reductase (EC1.1.1.36); (g) acetyl-CoA C-acetyltransferase (EC 2.3.1.9); (h) 3-hydroxybutyryl-CoA dehydrogenase (EC 1.1.1.157); (i) 3-hydroxybutyryl-CoA dehydratase (EC 4.2.1.55); (j) acyl-CoA thioesterase (EC 3.1.2.-) and/or a combination of phosphate butyryltransferase (EC 2.3.1.19) and butyrate kinase (EC 2.7.2.7); and (k) a phenyl acrylic acid decarboxylase enzyme (EC 4.1.1.-); or
(l) (i) aldehyde dehydrogenase (EC 1.2.1.-) or alcohol dehydrogenase (EC 1.1.1.-) or (ii) a combination of acyl-CoA thioesterase (EC 3.1.2.-) and aldehyde dehydrogenase (EC 1.2.1.-) or alcohol dehydrogenase (EC 1.1.1.-), or (iii) a combination of aldehyde ferredoxin oxidoreductase (EC 1.2.7.5) and acyl-CoA thioesterase (EC 3.1.2.-); or (iv) a combination of phosphate butyryltransferase (EC 2.3.1.19), butyrate kinase (EC 2.7.2.7) and aldehyde dehydrogenase (EC 1.2.1.-) or alcohol dehydrogenase (EC 1.1.1.-), or (v) a combination of phosphate butyryltransferase (EC 2.3.1.19), butyrate kinase (EC 2.7.2.7) and aldehyde ferredoxin oxidoreductase (EC 1.2.7.5); (m) aldehyde dehydrogenase (EC 1.2.1.-) and/or alcohol dehydrogenase (EC 1.1.1.-); and (n) geraniol isomerase (EC 5.4.4.4) or linalool dehydratase (EC 4.2.1.127), or a combination of (i) one or more of farnesol kinase (EC 2.7.1.-), geranylgeraniol kinase (EC 2.7.1.619), hydroxyethylthiazole kinase (EC 2.7.1.50) or undecaprenol kinase (EC 2.7.1.66), and (ii) one or more of 2-methyl-1,3-butadiene synthase (EC 4.2.3.27) or methylbutenol synthase;
(ii) the one or more enzymes that catalyse the conversion of 3-methylcrotonyl-CoA to an alkene comprise
(a) phenyl acrylic acid decarboxylase enzyme (EC 4.1.1.-); and (b) acyl-CoA thioesterase enzyme (EC 3.1.2.-) and/or a combination of phosphate butyryltransferase (EC 2.3.1.19) and butyrate kinase (EC 2.7.2.7); or
(c) (i) aldehyde dehydrogenase (EC 1.2.1.-) or alcohol dehydrogenase (EC 1.1.1.-) or (ii) a combination of acyl-CoA thioesterase (EC 3.1.2.-) and aldehyde dehydrogenase (EC 1.2.1.-) or alcohol dehydrogenase (EC 1.1.1.-), or (iii) a combination of aldehyde ferredoxin oxidoreductase (EC 1.2.7.5) and acyl-CoA thioesterase (EC 3.1.2.-); or (iv) a combination of phosphate butyryltransferase (EC 2.3.1.19), butyrate kinase (EC 2.7.2.7) and aldehyde dehydrogenase (EC 1.2.1.-) or alcohol dehydrogenase (EC 1.1.1.-), or (v) a combination of phosphate butyryltransferase (EC 2.3.1.19), butyrate kinase (EC 2.7.2.7) and aldehyde ferredoxin oxidoreductase (EC 1.2.7.5); (m) aldehyde dehydrogenase (EC 1.2.1.-) and/or alcohol dehydrogenase (EC 1.1.1.-); and (n) geraniol isomerase (EC 5.4.4.4) or linalool dehydratase (EC 4.2.1.127), or a combination of (i) one or more of farnesol kinase (EC 2.7.1.-), geranylgeraniol kinase (EC 2.7.1.619), hydroxyethylthiazole kinase (EC 2.7.1.50) or undecaprenol kinase (EC 2.7.1.66), and (ii) one or more of 2-methyl-1,3-butadiene synthase (EC 4.2.3.27) or methylbutenol synthase;
(iii) the one or more enzymes that catalyse the conversion of propionyl-CoA to an alkene comprise (a) acetyl-CoA C-acetyltransferase (EC 2.3.1.9); (b) a combination of (I) acetoacetyl-CoA reductase (EC 1.1.1.36) and enoyl-CoA hydratase 2 (EC 4.2.1.119) and/or (II) 3-hydroxybutyryl-CoA dehydrogenase (EC 1.1.1.157) and 3-hydroxybutyryl-CoA dehydratase (EC 4.2.1.55); (c) acyl-CoA thioesterase (EC 3.1.2.-) and/or a combination of phosphate butyryltransferase (EC 2.3.1.19) and butyrate kinase (EC 2.7.2.7); and (d) phenyl acrylic acid decarboxylase (EC 4.1.1.-); and
(iv) the one or more enzymes that catalyse the conversion of acryloyl-CoA to an alkene comprise (a) acyl-CoA thioesterase (EC 3.1.2.-) and/or a combination of phosphate butyryltransferase (EC 2.3.1.19) and butyrate kinase (EC 2.7.2.7); and (b) phenyl acrylic acid decarboxylase (EC 4.1.1.-).

5. The recombinant microorganism of claim 1, wherein the heterologous nucleic acid sequence is comprised in a heterologous nucleic acid molecule or in the microorganism's chromosome.

6. The recombinant microorganism of claim 2, wherein the endogenous enzymes that convert one or both of carbon monoxide and carbon dioxide to acetyl-CoA are enzymes of the Wood-Ljungdahl pathway.

7. The recombinant microorganism of claim 1, being a species of one of Clostridium ljungdahlii, Clostridium autoethanogenum, Clostridium carboxidivorans, Clostridium aceticum, Clostridium drakei, Clostridium scatologenes, Clostridium ragsdalei, Clostridium formicoaceticum, Clostridium magnum, Butyribacterium methylotrophicum, Acetobacterium woodii, Alkalibaculum bacchii, Aecetoariaerobium riotera, Blautia producta, Eubacterium limosum, Desulfitbacterium hafhierise, Moorella thermoacetica, Moorella thermautotrophica, Peptostreptococcus productus, Rhodospirillum rubrum, Sporomusa ovata, Sporomusa silvacetica, Sporomusa sphaeroides, Thermoanaerobacter kiuvi, Oxobacter pfennigii, Acetobacterium fimetarium, Acetohalobium arabaticu, Blautia wexlerae, Carbophilus carboxidus, Cloacibacillus evryensis, Hydrogenophaga pseudoflava, Rhodopseudomonas palustris, Pseudomonas gazotropha, Ralstonia eutropha, Calderihabitans maritimus, Caloribacterium cisternae, Carboxydobrachium pacificum, Carboxydocella ferrireducens, Carboxydocella sporoproducens, Carboxydocella thermautotrophica, Carboxydothermus ferrireducens, Carboxydothermus hydrogenoformans, Carboxydothermus islandicus, Carboxydothermus pertinax, Carboxydothermus siderophilus, Clostridium fervidus, Clostridium thermocellum, Desulfotomaculum carboxydivorans, Desulfotomaculum kuznetsovii, Desulfotomaculum thermobenzoicum subsp. thermosyntrophicum, Desulfotomaculum thermocisternum, Desulfurispora thermophila, Dictyoglomus thermophilum, Hydrogenophilus islandicus, Moorella mulderi, Moorella stamsii, Thermincola carboxydiphila, Thermincola ferriacetica, Thermincola potens, Thermoacetogenium phaeum, Thermoanaerobacter kivui, Thermoanaerobacter thermohydrosulfuricus subsp. carboxydovorans, Thermosinus carboxydivorans, Sporomusa termitida, Clostridium formicaceticum, Oligotropha carboxidovorans, Desulfotomaculum gibsoniae, Desulfosporosinus meridiei, Blautia hydrogenotrophica, Dehalococcoides mccartyi, Desulfatibacillum aliphaticivorans, Desulfobacterium autotrophicum, Desulfobacula toluolica, Desulfospira joergensenii, Desulfosporosinus orientis, Desulfosporosinus youngiae, Desulfotomaculum acetoxidans, Desulfotomaculum alcoholivorax, Desulfotomaculum carboxydivorans, Desulfotomaculum sapomandens, Desulfotomaculum thermocisternum, Desulfovermiculus halophilus, Desulfovibrio alaskensis, Desulfovibrio desulfuricans, Desulfovibrio frigidus, Desulfurispora thermophila, Holophaga foetida, Methanobrevibacter arboriphilus, Orenia salinaria, Paenibacillus polymyxa, Tindallia califomiensis, Anoxybacillus flavithermus, Desulfovirgula thermocuniculi, Thermosediminibacter oceani, Acetobacterium bakii, Acetobacterium carbinolicum, Acetobacterium dehalogenans, Acetobacterium malicum, Acetobacterium paludosum, Acetobacterium tundrae, Acetobacterium wieringae, Candidatus Scalindua brodae, Acetoanaerobium noterae, Blautia hansenii, Ammonifex degensii, Acetitomaculum ruminis, Acetoanaerobium romashkovil, Acetobacterium psammolithicum, Acetonema longum, Bryanella formatexigens, Caloramator fervidus, Clostridium coccoides, Clostridium difficile, Moorella glycerini, Natroniella acetigena, Natronincola histinovorans, Ruminococcus hydrogenotrophicus, Ruminococcus productus, Ruminococcus schinkii, Sporomusa acidovorans, Sporomusa aerivorans, Sporomusa malonica, Sporomusa paucivorans, Syntrophococcus sucromutans, Treponema primitia, Pseudomonas carboxydohyrogena, Pseudomonas thermocarboxydovorans, Bradyrhizobium japonicum, Streptomyces thermoautotrophicus, Mycobacterium smegmatis, Mycobacterium gordonae, Mycobacterium tuberculosis, Bacillus schlegelii, Caldanaerobacter subterraneus, Thermolithobacter carboxydivorans, Thermococcus onnurineus, Thermofilum carboxyditrophus, Archaeoglobus fulgidus, Desulfomonile tiedjei, Desulfovibrio vulgaris, Thermoproteus tenax or Rubrivivax gelatinosa.

8. The recombinant microorganism of claim 1, wherein the heterologous nucleic acid sequence comprises:
(a) a combination of coding sequences encoding (i) the enzyme acetyl-CoA C-acetyltransferase (EC 2.3.1.9); (ii) the enzyme 3-hydroxybutyryl-CoA dehydrogenase (EC 1.1.1.157); (iii) the enzyme 3-hydroxybutyryl-CoA dehydratase (EC 4.2.1.55); (iv) an acyl-CoA thioesterase enzyme (EC 3.1.2.-); (v) an aldehyde dehydrogenase (EC 1.2.1.-) or an alcohol dehydrogenase enzyme (EC 1.1.1.-); and (vi) the enzyme geraniol isomerase (EC 5.4.4.4) or the enzyme linalool dehydratase (EC 4.2.1.127); or
(b) a combination of coding sequences encoding (i) the enzyme Acetyl-CoA carboxylase (EC 6.4.1.2); (ii) the enzyme acetoacetyl-CoA synthase (EC 2.3.1.194); (iii) the enzyme acetoacetyl-CoA reductase (EC 1.1.1.36); (iv) the enzyme enoyl-CoA hydratase 2 (EC 4.2.1.119); (v) an acyl-CoA thioesterase enzyme (EC 3.1.2.-); (vi) an aldehyde dehydrogenase (EC 1.2.1.-) or an alcohol dehydrogenase enzyme (EC 1.1.1.-); and (vii) the enzyme geraniol isomerase (EC 5.4.4.4) or the enzyme linalool dehydratase (EC 4.2.1.127); or
(c) a combination of coding sequences encoding the enzyme 4-aminobutyrate aminotransferase (EC 2.6.1.19); the enzyme glutamate dehydrogenase (EC 1.4.1.2); the enzyme 2-hydroxyglutarate dehydrogenase (EC 1.1.99.2); the enzyme glutaconate CoA-transferase (EC 2.8.3.12); a 2-hydroxyglutaryl-CoA dehydratase enzyme (EC 4.2.1.-); the enzyme glutaconyl-CoA decarboxylase (EC 4.1.1.70); an acyl-CoA thioesterase enzyme (EC 3.1.2.-); an aldehyde dehydrogenase (EC 1.2.1.-) or an alcohol dehydrogenase enzyme (EC 1.1.1.-); and the enzyme geraniol isomerase (EC 5.4.4.4) or the enzyme linalool dehydratase (EC 4.2.1.127); or
(d) a combination of coding sequences encoding the enzyme 4-aminobutyrate aminotransferase (EC 2.6.1.19); the enzyme 4-hydroxybutyrate dehydrogenase (EC 1.1.1.61); a 4-hydroxybutyrate CoA-transferase enzyme (EC 2.8.3.-); the enzyme vinylacetyl-CoA-Delta-isomerase (EC 4.2.1.120); the enzyme 4-hydroxybutyryl-CoA dehydratase (EC 5.3.3.3); an acyl-CoA thioesterase enzyme (EC 3.1.2.-); an aldehyde dehydrogenase (EC 1.2.1.-) or an alcohol dehydrogenase enzyme (EC 1.1.1.-); and the enzyme geraniol isomerase (EC 5.4.4.4) or the enzyme linalool dehydratase (EC 4.2.1.127); or
(e) a combination of coding sequences encoding
(i) (I) the enzyme acetyl-CoA C-acetyltransferase (EC 2.3.1.9) and/or the enzymes acetyl-CoA carboxylase (EC 6.4.1.2) and acetoacetyl-CoA synthase (EC 2.3.1.194), the enzyme 3-hydroxy-3-methylglutaryl-CoA synthase (EC 2.3.3.10), the enzyme 3-methylglutaconyl-CoA hydratase (EC 4.2.1.18), and the enzyme 3-methylcrotonyl-CoA carboxylase (EC 6.4.1.4), or (II) a combination of coding sequences encoding (i) a combination of (I) the enzymes acetyl-CoA C-acetyltransferase (EC 2.3.1.9), 3-hydroxybutyryl-CoA dehydrogenase (EC 1.1.1.157), and 3-hydroxybutyryl-CoA dehydratase (EC 4.2.1.55) and/or (II) the enzymes Acetyl-CoA carboxylase (EC 6.4.1.2), acetoacetyl-CoA synthase (EC 2.3.1.194), acetoacetyl-CoA reductase (EC 1.1.1.36) and enoyl-CoA hydratase 2 (EC 4.2.1.119); and
(ii) an aldehyde dehydrogenase (EC 1.2.1.-) or an alcohol dehydrogenase enzyme (EC 1.1.1.-); and
(iii) the enzymes geraniol isomerase (EC 5.4.4.4) and/or linalool dehydratase (EC 4.2.1.127), and/or a combination of (I) one or more of the enzymes farnesol kinase (EC 2.7.1.-), geranylgeraniol kinase (EC 2.7.1.619), hydroxyethylthiazole kinase (EC 2.7.1.50) or undecaprenol kinase (EC 2.7.1.66), and (II) one or more of the enzymes 2-methyl-1,3-butadiene synthase (EC 4.2.3.27) or methylbutenol synthase; or
(f) a combination of coding sequences encoding
(i) (I) a combination of the enzymes acetyl-CoA C-acetyltransferase (EC 2.3.1.9), 3-hydroxybutyryl-CoA dehydrogenase (EC 1.1.1.157), and 3-hydroxybutyryl-CoA dehydratase (EC 4.2.1.55), and/or a combination of the enzymes the enzymes Acetyl-CoA carboxylase (EC 6.4.1.2), acetoacetyl-CoA synthase (EC 2.3.1.194), acetoacetyl-CoA reductase (EC 1.1.1.36) and enoyl-CoA hydratase 2 (EC 4.2.1.119), or (II) a combination of the enzyme acetyl-CoA C-acetyltransferase (EC 2.3.1.9) and/or the enzymes Acetyl-CoA carboxylase (EC 6.4.1.2) and acetoacetyl-CoA synthase (EC 2.3.1.194); the enzyme 3-hydroxy-3-methylglutaryl-CoA synthase (EC 2.3.3.10); the enzyme 3-methylglutaconyl-CoA hydratase (EC 4.2.1.18); and the enzyme 3-methylglutaconyl-CoA decarboxylase; and
(ii) a combination of the enzymes phosphate butyryltransferase (EC 2.3.1.19) and butyrate kinase (EC 2.7.2.7), and/or an acyl-CoA thioesterase enzyme (EC 3.1.2.-); and (iii) a phenyl acrylic acid decarboxylase enzyme (EC 4.1.1.-); or
(g) a combination of coding sequences encoding (i) the enzyme lactate CoA-transferase (EC 2.8.3.-), (ii) the enzyme lactoyl-CoA dehydratase (EC 4.2.1.54), (iii) one or both of (I) the enzyme acyl-CoA thioesterase (EC 3.1.2.-) or (II) a combination of the enzyme phosphate butyryltransferase (EC 2.3.1.19) and the enzyme butyrate kinase (EC 2.7.2.7); and (iv) the enzyme phenyl acrylic acid decarboxylase (EC 4.1.1.-); or
(h) a combination of coding sequences encoding
(i) (I) a combination of the enzyme 4-aminobutyrate aminotransferase (EC 2.6.1.19), the enzyme 4-hydroxybutyrate dehydrogenase (EC 1.1.1.61), a 4-hydroxybutyrate CoA-transferase enzyme (EC 2.8.3.-), the enzyme vinylacetyl-CoA-delta-isomerase (EC 4.2.1.120), and the enzyme 4-hydroxybutyryl-CoA dehydratase (EC 5.3.3.3), or (II) the enzyme 4-aminobutyrate aminotransferase (EC 2.6.1.19), the enzyme glutamate dehydrogenase (EC 1.4.1.2), the enzyme 2-hydroxyglutarate dehydrogenase (EC 1.1.99.2), the enzyme glutaconate CoA-transferase (EC 2.8.3.12), the enzyme 2-hydroxyglutaryl-CoA dehydratase (EC 4.2.1.-), and the enzyme glutaconyl-CoA decarboxylase (EC 4.1.1.70); and
(ii) a combination of the enzymes phosphate butyryltransferase (EC 2.3.1.19) and butyrate kinase (EC 2.7.2.7), and/or an acyl-CoA thioesterase enzyme (EC 3.1.2.-); and
(iii) the enzyme phenyl acrylic acid decarboxylase (EC 4.1.1.-); or
(i) a combination of coding sequences encoding (i) a combination of (I) 3-hydroxybutyryl-CoA dehydrogenase (EC 1.1.1.157), and 3-hydroxybutyryl-CoA dehydratase (EC 4.2.1.55) and/or (II) the enzymes Acetyl-CoA carboxylase (EC 6.4.1.2), acetoacetyl-CoA synthase (EC 2.3.1.194), acetoacetyl-CoA reductase (EC 1.1.1.36) and enoyl-CoA hydratase 2 (EC 4.2.1.119); (ii) the enzyme trans-2-enoyl-CoA reductase (EC1.1.1.36); (iii) the enzyme acetyl-CoA C-acetyltransferase (EC 2.3.1.9); (iv) the enzyme 3-hydroxybutyryl-CoA dehydrogenase (EC 1.1.1.157); (v) the enzyme 3-hydroxybutyryl-CoA dehydratase (EC 4.2.1.55); (vi) a combination of the enzymes phosphate butyryltransferase (EC 2.3.1.19) and butyrate kinase (EC 2.7.2.7), and/or an acyl-CoA thioesterase enzyme (EC 3.1.2.-); and (vii) a phenyl acrylic acid decarboxylase enzyme (EC 4.1.1.-); or
(j) a combination of coding sequences encoding (i) the enzyme acetyl-CoA carboxylase (EC 6.4.1.2); (ii) the enzyme methylmalonyl-CoA mutase (EC 5.4.99.2); (iii) the enzyme methylmalonyl-CoA decarboxylase (EC 4.1.1.41); (iv) the enzyme acetyl-CoA C-acetyltransferase (EC 2.3.1.9); (v) a combination of (I) the enzymes acetoacetyl-CoA reductase (EC 1.1.1.36) and enoyl-CoA hydratase 2 (EC 4.2.1.119) and/or (II) the enzymes 3-hydroxybutyryl-CoA dehydrogenase (EC 1.1.1.157) and 3-hydroxybutyryl-CoA dehydratase (EC 4.2.1.55); (vi) an acyl-CoA thioesterase enzyme (EC 3.1.2.-); (vii) the enzyme acetyl-CoA C-acetyltransferase (EC 2.3.1.9); (iix) a combination of (I) the enzymes acetoacetyl-CoA reductase (EC 1.1.1.36) and enoyl-CoA hydratase 2 (EC 4.2.1.119) and/or (II) the enzymes 3-hydroxybutyryl-CoA dehydrogenase (EC 1.1.1.157) and 3-hydroxybutyryl-CoA dehydratase (EC 4.2.1.55); (ix) a combination of the enzymes phosphate butyryltransferase (EC 2.3.1.19) and butyrate kinase (EC 2.7.2.7), and/or an acyl-CoA thioesterase enzyme (EC 3.1.2.-); and (x) a phenyl acrylic acid decarboxylase enzyme (EC 4.1.1.-); or
(k) a combination of coding sequences encoding
(i)(I) a combination of the enzyme 2-oxoglutarate/butyrate ferredoxin oxidoreductase (EC 1.2.7.3), and the enzyme pyruvate/2-oxobutyrate ferredoxin oxidoreductase (EC 1.2.7.1); (II) a combination of a lactate CoA-transferase enzyme (EC 2.8.3.-), the enzyme lactoyl-CoA dehydratase (EC 4.2.1.54), and the enzyme propionyl-CoA synthase (EC 1.3.1.84); or (III) a combination of the enzyme acetyl-CoA carboxylase (EC 6.4.1.2), the enzyme malonyl CoA reductase (EC 1.2.1.75), the enzyme malonyl CoA reductase (EC 1.1.1.298), the enzyme propionyl-CoA synthase (EC 6.2.1.36), the enzyme propionyl-CoA synthase/acryloyl-CoA synthase (EC 4.2.1.116), and the enzyme propionyl-CoA synthase (EC 1.3.1.84); and (ii) the enzyme lactoyl-CoA dehydratase (EC 4.2.1.54); and
(iii) the enzyme acetyl-CoA C-acetyltransferase (EC 2.3.1.9); and (iv) a combination of (I) the enzymes acetoacetyl-CoA reductase (EC 1.1.1.36) and enoyl-CoA hydratase 2 (EC 4.2.1.119) and/or (II) the enzymes 3-hydroxybutyryl-CoA dehydrogenase (EC 1.1.1.157) and 3-hydroxybutyryl-CoA dehydratase (EC 4.2.1.55); (iv) a combination of the enzymes phosphate butyryltransferase (EC 2.3.1.19) and butyrate kinase (EC 2.7.2.7), and/or an acyl-CoA thioesterase enzyme (EC 3.1.2.-); and (v) a phenyl acrylic acid decarboxylase enzyme (EC 4.1.1.-); or
(l) a combination of coding sequences encoding (i) the enzyme 4-aminobutyrate aminotransferase (EC 2.6.1.19); (ii) a combination of (I) the enzyme glutamate dehydrogenase (EC 1.4.1.2), the enzyme 2-hydroxyglutarate dehydrogenase (EC 1.1.99.2), the enzyme glutaconate CoA-transferase (EC 2.8.3.12), a 2-hydroxyglutaryl-CoA dehydratase enzyme (EC 4.2.1.-) and/or (II) the enzyme 4-hydroxybutyrate dehydrogenase (EC 1.1.1.61), a 4-hydroxybutyrate CoA-transferase enzyme (EC 2.8.3.-), the enzyme vinylacetyl-CoA-delta-isomerase (EC 4.2.1.120) and the enzyme glutaconyl-CoA decarboxylase (EC 4.1.1.70); (iii) the enzyme 4-hydroxybutyryl-CoA dehydratase (EC 5.3.3.3); (iv) the enzyme trans-2-enoyl-CoA reductase (EC1.1.1.36); (v) the enzyme acetyl-CoA C-acetyltransferase (EC 2.3.1.9); (vi) the enzyme 3-hydroxybutyryl-CoA dehydrogenase (EC 1.1.1.157); (vii) the enzyme 3-hydroxybutyryl-CoA dehydratase (EC 4.2.1.55); (iix) an acyl-CoA thioesterase enzyme (EC 3.1.2.-); and (x) a phenyl acrylic acid decarboxylase enzyme (EC 4.1.1.-); or
(m) a combination of coding sequences encoding
(i)(I) a combination of the enzyme acetyl-CoA carboxylase (EC 6.4.1.2), the enzyme malonyl CoA reductase (malonate semialdehyde-forming) (EC 1.2.1.75), the enzyme 3-hydroxypropionate dehydrogenase (EC 1.1.1.298), the enzyme 3-hydroxypropionyl-CoA synthase (EC 6.2.1.36), and the enzyme hydroxypropionyl-CoA dehydratase (EC 4.2.1.116), or (II) a combination of (□) the enzyme acetyl-CoA carboxylase (EC 6.4.1.2), a lactate CoA-transferase enzyme (EC 2.8.3.-), and the enzyme lactoyl-CoA dehydratase (EC 4.2.1.54) and/or (□) a lactate CoA-transferase enzyme (EC 2.8.3.-) and the enzyme lactoyl-CoA dehydratase (EC 4.2.1.54);
(ii) (I) a combination of the enzymes phosphate butyryltransferase (EC 2.3.1.19) and butyrate kinase (EC 2.7.2.7), and/or (II) an acyl-CoA thioesterase enzyme (EC 3.1.2.-); and
(iii) a phenyl acrylic acid decarboxylase enzyme (EC 4.1.1.-).

9. A method of producing one or more alkenes with a main chain of 2 to 5 carbon atoms, the method comprising contacting a recombinant microorganism according to claim 1 with one or both of carbon monoxide or carbon dioxide.

10. The method of claim 9, being a method of producing one or more of ethylene, 1-propene, 1-butene, 2-methylpropene, 1,3-butadiene, 1-pentene, or 2-methyl-1,3-butadiene.
